(19) United States
(12) Patent Application Publication
(10) Pub. No.: US 2022/0259268 A1
(43) Pub. Date: Aug. 18, 2022

(54) ADHESIVE PROTEIN

(71) Applicant: National University Corporation Tokai National Higher Education and Research System, Nagoya-shi, Aichi (JP)

(72) Inventor: Katsutoshi Hori, Nagoya-shi, Aichi (JP)

(21) Appl. No.: 17/628,132

(22) PCT Filed: Jul. 17, 2020
(86) PCT No.: PCT/JP2020/027921

§ 371 Date: Jan. 18, 2022

(30) Foreign Application Priority Data
Jul. 18, 2019 (JP) 2019-132488

(51) Int. Cl. C07K 14/195; C12N 11/02

(52) U.S. Cl. CPC C07K 14/195; C07K 2319/00; C12N 11/02

(57) ABSTRACT

The present invention provides a novel polypeptide. The polypeptide found by the inventors of the present invention does not have self-cohesive properties and has adhesive properties. The adhesive polypeptide according to the present invention comprises a fragment of the amino acid sequence represented by SEQ ID NO: 1. The adhesive polypeptide according to a specific embodiment of the present invention includes, from among the amino acid sequence represented by SEQ ID NO: 1, amino acids at positions 22-50 and positions 161-175, and also includes, from among amino acids at positions 2847-3093, deletion of a region required to impart self-cohesive properties.

### TECHNICAL FIELD

[0001] The present disclosure relates to an adhesive polypeptide without a self-aggregation property and use thereof.

### BACKGROUND ART

[0002] Acinetobacter sp. To15 (genus Acinetobacter bacteria To15 strain) previously isolated from a biofilter by the inventor are non-pathogenic gram-negative bacteria that have a high cell self-aggregation property and exhibits high adhesive properties to various material surfaces, from various hydrophobic plastic carriers to hydrophilic glass and even metal surfaces. A novel bacterial nanofiber present on the surface layer of a bacterial cell as a factor which brings about such adhesive properties that have not been reported in other microorganisms has been discovered, and a new protein constituting the nanofiber has also been identified. This protein belongs to the trimeric autotransporter adhesin (TAA) family of Gram-negative bacteria and is named AtaA by the inventors (Non-Patent Literature 1). Proteins of the TAA family form a homotrimer and has a common basic structure of signal peptide-head-neck-stalk-membrane anchor from the amino terminus to the carboxy terminus (Non Patent Literature 2). A membrane anchor domain is also referred to as a translocator domain, which forms a beta barrel on the outer membrane and has a function of extracellularly transporting, and presenting to the cell surface layer as a fiber, a passenger domain consisting of head-neck-stalk after a signal peptide is cleaved at the periplasmic space. The head side of a passenger domain is the tip of fiber, corresponding to the amino terminus side of a mature protein. However, there are TAAs that are small with about 300 amino acid residues in a constituent monomer polypeptide chain and those that are large with more than 3000 amino acid residues. The type and arrangement of domains and motifs constituting an amino acid sequence, especially a passenger domain, are diverse. A monomer polypeptide chain that constitutes AtaA discovered by the inventor consists of 3630 amino acids (length including the signal peptide), and is one of the largest among TAAs. This has a unique primary structure with a plurality of long repeat sequences arranged in a mosaic pattern on a long stalk. The repeat sequence is formed by many types of domains repeating and coexisting. The head is also one of the domains. There is one more in the stalk towards the membrane anchor, aside from the tip of the fiber.

[0003] AtaA is extremely useful for immobilization of microorganisms and is expected to be applied to various bioprocesses (see, for example, Patent Literatures 1 and 2). Furthermore, in a previous patent application (Patent Literature 3), the inventors reported that various functional peptides and proteins can be introduced into AtaA and presented on the surface of a microorganism. Note that, in Patent Literature 1, AtaA and the gene encoding it (ataA gene) were referred to as AadA and aadA genes, respectively.

### CITATION LIST

### Patent Literature

[0004] [PTL 1] WO 2009/104281
[0005] [PTL 2] WO 2014/156736
[0006] [PTL 3] WO 2015/030171

### Non Patent Literature

[0007] [NPL 1] Ishikawa, M.; Nakatani, H.; Hori, K., AtaA, a new member of the trimeric autotransporter adhesins from Acinetobacter sp. To15 mediating high adhesiveness to various abiotic surfaces. PLoS One 2012,7,(11),e48830. [NPL 2] Linke, D.; Riess, T.; Autenrieth, I. B.; Lupas, A.; Kempf, V. A., Trimeric autotransporter adhesins: variable structure, common function. Trends Microbio1.2006, 14, (6), 264-270.

### SUMMARY OF INVENTION

### Solution to Problem

[0008] The inventors, as a result of diligent studies, discovered that an AtaA protein can exert an adhesive property and self-aggregation property even when only a passenger domain is detached from the cell surface layer and purified. It was also discovered that the same domain is responsible for an adhesive property and self-aggregation property. Despite of the above, an unexpected new fact was found, i.e., an AtaA fragment that lacks a self-aggregation property while maintaining an adhesive property can be obtained by deleting a domain that is different from a domain responsible for self-aggregation from an AtaA passenger domain detached from cells. The present disclosure also relates to applications of the adhesive polypeptide of the present disclosure, e.g., immobilization and/or adhesion method of a functionality-imparting entity and the like.

[0009] The improved AtaA in the present disclosure is not produced from a cell, but is found in a protein from which AtaA is separated and purified. In one specific embodiment, one feature can be a lack of a C-terminal membrane binding site for this purpose. Absence of a signal peptide as an adhesive protein can also be one non-limiting representative feature. These features can be utilized as a protein material detached from microorganisms unlike conventionally known AtaA. It was elucidated in the present disclosure that the improved AtaA self-aggregates without Chead, when present on a cell. However, an AtaA fragment loses a self-aggregation property when detached from a cell and Chead is deleted. These features are not a feature of conventional AtaA.

[0010] Therefore, the present disclosure provides the following.
[0011] (1) A polypeptide comprising a fragment of the amino acid sequence set forth in SEQ ID NO: 1 or a variant sequence thereof, wherein the polypeptide does not have a self-aggregation property and has an adhesive property.
[0012] (2)The polypeptide according to any of the preceding items, comprising a sequence corresponding to amino acid positions 22 to 50 and 161 to 175 of the amino acid sequence set forth in SEQ ID NO: 1 or a variant sequence thereof, and one or more amino acid substitutions, additions, deletions, or combinations thereof in a range of a sequence corresponding to amino acid positions 2847 to 3093 of the amino acid sequence set forth in SEQ ID NO: I.
[0013] (3)The polypeptide according to any of the preceding items, wherein the range of a sequence corresponding to amino acid positions 2847 to 3093 of the amino acid sequence set forth in SEQ ID NO: 1 is a range corresponding to amino acid positions 2855 to 3093 of the amino acid sequence set forth in SEQ ID NO: 1.
[0014] (4) The polypeptide according to any of the preceding items wherein the entire sequence corresponding to amino acid positions 2855 to 3093 of the amino acid sequence set forth in SEQ ID NO: 1 is deleted.
[0015] (5) A polypeptide, which is
[0016] (A) a polypeptide comprising, in a sequence corresponding to amino acid positions 1 to 3518 of the amino acid sequence set forth in SEQ ID NO: 1 or a variant sequence thereof or a fragment thereof,

[0017] at least one or more amino acid substitutions, additions, deletions, or combinations thereof in a sequence corresponding to amino acid positions 2855 to 3093 of SEQ ID NO: 1, and

[0018] a sequence having a sequence corresponding to amino acid positions 22 to 50 and 161 to 175 of SEQ ID NO: 1 or a variant sequence thereof, (B) a polypeptide comprising, in a sequence corresponding to amino acid positions 1 to 3093 of the amino acid sequence set forth in SEQ ID NO: 1 or a variant sequence thereof or a fragment thereof,

[0019] at least one or more amino acid substitutions, additions, deletions, or combinations thereof in a sequence corresponding to amino acid positions 2855 to 3093, and

[0020] a sequence having a sequence corresponding to amino acid positions 22 to 50 and 161 to 175 or a variant sequence thereof,
[0021] (C) a polypeptide, which is a sequence corresponding to amino acid positions 1 to 2846 of the amino acid sequence set forth in SEQ ID NO: 1 or a variant sequence thereof or a fragment thereof, comprising

[0022] a sequence corresponding to amino acid positions 22 to 50 and 161 to 175 or a variant sequence thereof,
[0023] (D) a polypeptide comprising

[0024] a part of amino acid positions 1 to 3518 of the amino acid sequence set forth in SEQ ID NO: 1,

[0025] at least one or more amino acid substitutions, additions, deletions, or combinations thereof in a sequence corresponding to amino acid positions 2855 to 3093 of SEQ ID NO: 1, and

[0026] a sequence corresponding to amino acid positions 22 to 50 and 161 to 175 of SEQ ID NO: I or a variant sequence thereof,
[0027] (E) a polypeptide, which is a sequence corresponding to amino acid positions 1 to 2854 of the amino acid sequence set forth in SEQ ID NO: 1 or a variant sequence thereof or a fragment thereof, having

[0028] a sequence corresponding to amino acid positions 22 to 50 and 161 to 175 or a variant sequence thereof, or
[0029] (F) a polypeptide, which is a sequence corresponding to amino acid positions 1 to 268 of the amino acid sequence set forth in SEQ ID NO: 1 or a variant sequence thereof or a fragment thereof, having

[0030] a sequence corresponding to amino acid positions 22 to 50 and 161 to 175 or a variant sequence thereof. (5A) The polypeptide according to any of the preceding items, which is
[0031] (a) a polypeptide, which is an amino acid sequence corresponding to amino acid positions 1 to 2854 of the amino acid sequence set forth in SEQ ID NO: 1 or a variant sequence thereof or a fragment thereof, having a sequence corresponding to amino acid positions 22 to 50 and 161 to 175 or a variant sequence thereof,
[0032] (b) a polypeptide, which is an amino acid sequence corresponding to amino acid positions 1 to 2846 of the amino acid sequence set forth in SEQ ID NO: 1 or a variant sequence thereof or a fragment thereof, having a sequence corresponding to amino acid positions 22 to 50 and 161 to 175 or a variant sequence thereof,
[0033] (c) a polypeptide, which is a sequence corresponding to amino acid positions 1 to 268 of the amino acid sequence set forth in SEQ ID NO: 1 or a variant sequence thereof or a fragment thereof, having a sequence corresponding to amino acid positions 22 to 50 and 161 to 175 or a variant sequence thereof, or
[0034] (d) a polypeptide, which is a sequence corresponding to amino acid positions I to 257 of the amino acid sequence set forth in SEQ ID NO: 1 or a variant sequence thereof or a fragment thereof, having a sequence corresponding to amino acid positions 22 to 50 and 161 to 175 or a variant sequence thereof.
[0035] (5B) The polypeptide according to any of the preceding items, which is
[0036] (i) a polypeptide comprising an amino acid sequence corresponding to amino acid positions 1 to 2854 of the amino acid sequence set forth in SEQ ID NO: 1 or a variant sequence thereof or a fragment thereof,
[0037] (ii) a polypeptide comprising an amino acid sequence corresponding to amino acid positions 1 to 2846 of the amino acid sequence set forth in SEQ ID NO: 1 or a variant sequence thereof or a fragment thereof,
[0038] (iii) a polypeptide comprising an amino acid sequence corresponding to amino acid positions 1 to 268 of the amino acid sequence set forth in SEQ ID NO: 1 or a variant sequence thereof or a fragment thereof, or
[0039] (iv) a polypeptide comprising an amino acid sequence corresponding to amino acid positions 1 to 257 of the amino acid sequence set forth in SEQ ID NO: 1 or a variant sequence thereof or a fragment thereof.
[0040] (5C) The polypeptide according to any of the preceding items, which is an amino acid sequence corresponding to amino acid positions I to 2854 of the amino acid sequence set forth in SEQ ID NO: 1 or a variant sequence thereof or a fragment thereof.
[0041] (5D) The polypeptide according to any of the preceding items, which is an amino acid sequence corresponding to amino acid positions 1 to 2846 of the amino acid sequence set forth in SEQ ID NO: 1 or a variant sequence thereof or a fragment thereof.
[0042] (5D) The polypeptide according to any of the preceding items, which is an amino acid sequence corresponding to amino acid positions I to 268 of the amino acid sequence set forth in SEQ ID NO: 1 or a variant sequence thereof or a fragment thereof.
[0043] (5E) The polypeptide according to any of the preceding items, which is an amino acid sequence corresponding to amino acid positions 1 to 257 of the amino acid sequence set forth in SEQ ID NO: 1 or a variant sequence thereof or a fragment thereof.
[0044] (6)The polypeptide according to any of the preceding items, consisting of an amino acid sequence corresponding to amino acid positions 1 to 2854 of the amino acid sequence set forth in SEQ ID NO: 1.
[0045] (7)The polypeptide according to any of the preceding items, consisting of an amino acid sequence corresponding to amino acid positions 1 to 2846 of the amino acid sequence set forth in SEQ ID NO: 1.
[0046] (8)The polypeptide according to any of the preceding items, consisting of an amino acid sequence corresponding to amino acid positions 1 to 268 of the amino acid sequence set forth in SEQ ID NO: 1.
[0047] (9)The polypeptide according to any of the preceding items, consisting of an amino acid sequence corresponding to amino acid positions 1 to 257 of the amino acid sequence set forth in SEQ ID NO: 1.
[0048] (10) The polypeptide according to any of the preceding items, wherein the variant sequence comprises an alteration by a conservative substitution.
[0049] (11) The polypeptide according to any of the preceding items, which is derived from an Acinetobacter bacterium.
[0050] (12) The polypeptide according to any of the preceding items, wherein the Acinetobacter bacterium is of an Acinetobacter sp. To15 strain.
[0051] (13) The polypeptide according to any of the preceding items, further comprising an amino acid sequence that is different from SEQ ID NO: -(
[0052] (14) The polypeptide according to any of the preceding items, wherein the amino acid sequence that is different is fused with the fragment.
[0053] (15) A complex of the polypeptide according to any of the preceding items and a functionality-imparting entity.
[0054] (16) A composition for use in causing adhesion and/or immobilization of a first subject to a second subject without self-aggregation, comprising the polypeptide according to any of the preceding items or the complex according to any of the preceding items.
[0055] (17) The composition according to any of the preceding items for use in causing monolayer adhesion of the first subject to the second subject.
[0056] (18) The composition according to any of the preceding items, wherein the first subject and the second subject are the same.
[0057] (19) The composition according to any of the preceding items, wherein the first subject and the second subject are different.
[0058] (20) The composition according to any of the preceding items, wherein at least one of the first subject or the second subject is a functionality-imparting entity.
[0059] (21) The composition according to any of the preceding items, wherein the functionality-imparting entity is a peptide and/or a protein.
[0060] (22) The composition according to any of the preceding items, wherein the functionality-imparting entity is streptavidin, neutral avidin, or a variant thereof.
[0061] (23) The composition according to any of the preceding items, wherein the functionality-imparting entity is a cell.
[0062] (24) The composition according to any of the preceding items, wherein the second subject is a support.
[0063] (25) The composition according to any of the preceding items, wherein the support is a liposome.
[0064] (26) A composition for use in causing adhesion and/or immobilization of a first subject to a second subject without self-aggregation, comprising the polypeptide according to any of the preceding items or the complex according to any of the preceding items, wherein the first subject is the peptide comprising the different amino acid sequence or the functionality-imparting entity.
[0065] (27) A method for use in causing adhesion and/or immobilization of a first subject to a second subject, comprising causing the polypeptide according to any of the preceding items or the complex according to any of the preceding items to act on the first and/or second subject.
[0066] (28) The method according to any of the preceding items for use in causing monolayer adhesion of the first subject to the second subject.
[0067] (29) The method according to any of the preceding items, wherein the first subject and the second subject are the same.
[0068] (30) The method according to any of the preceding items, wherein the first subject and the second subject are different.
[0069] (31) The method according to any of the preceding items, wherein at least one of the first subject or the second subject is a functionality-imparting entity.
[0070] (32) The method according to any of the preceding items, wherein the functionality-imparting entity is a peptide and/or a protein.
[0071] (33) The method according to any of the preceding items, wherein the functionality-imparting entity is streptavidin, neutral avidin, or a variant thereof.
[0072] (34) The method according to any of the preceding items, wherein the functionality-imparting entity is a cell.
[0073] (35) The method according to any of the preceding items, wherein the second subject is a support.
[0074] (36) The method according to any of the preceding items, wherein the support is a liposome.
[0075] (37) A method for use in causing adhesion and/or immobilization of the peptide comprising the different amino acid sequence or the functionality-imparting entity to a second subject without self-aggregation, comprising causing the polypeptide according to any of the preceding items or the complex according to any of the preceding items to act on the second subject.
[0076] (38) A support on which the polypeptide according to any of the preceding items or the complex according to any of the preceding items is immobilized.
[0077] (39) The support according to any of the preceding items, wherein the support is selected from the group consisting of a lipid bilayer structure, glass, silica, silicon, ceramic, silicon dioxide, plastic, metal, titanium, acrylic material, and naturally-occurring and synthetic polymers.
[0078] (40) Use of the polypeptide according to any of the preceding items or the complex according to any of the preceding items for causing adhesion and/or immobilization of a first subject to a second subject without self-aggregation.
[0079] (41) The use according to any of the preceding items, wherein the use is use for causing monolayer adhesion of the first subject to the second subject.
[0080] (42) The use according to any of the preceding items, wherein the first subject and the second subject are the same.
[0081] (43) The use according to any of the preceding items, wherein the first subject and the second subject are different.
[0082] (44) The use according to any of the preceding items, wherein at least one of the first subject or the second subject is a functionality-imparting entity.
[0083] (45) The use according to any of the preceding items, wherein the functionality-imparting entity is a peptide and/or a protein.
[0084] (46) The use according to any of the preceding items, wherein the functionality-imparting entity is streptavidin, neutral avidin, or a variant thereof.
[0085] (47) The use according to any of the preceding items, wherein the functionality-imparting entity is a cell.
[0086] (48) The use according to any of the preceding items, wherein the second subject is a support.
[0087] (49) The use according to any of the preceding items, wherein the support is a liposome.
[0088] (50) Use of the polypeptide according to any of the preceding items or the complex according to any of the preceding items for causing adhesion and/or immobilization of a first subject to a second subject without self-aggregation, wherein the first subject is the peptide comprising the different amino acid or the functionality-imparting entity.

[0089] The present disclosure is intended so that one or more of the features described above can be provided not only as the explicitly disclosed combinations, but also as other combinations. Additional embodiments and advantages of the present disclosure are recognized by those skilled in the art by reading and understanding the following detailed description as needed.

### Advantageous Effects of Invention

[0090] Use of the present disclosure has enabled immobilization and/or adhesion of an adhesive polypeptide (including fusion polypeptide) and/or a complex of an adhesive polypeptide and a functionality-imparting entity of the present disclosure without self-aggregation. In one aspect, the present disclosure has enabled immobilization and/or adhesion of an adhesive polypeptide (including fusion polypeptide) and a functionality-imparting entity on a membrane of a liposome. Thus, the adhesive polypeptide of the present disclosure is useful for a separation process in pharmaceutical/chemical product industries, regenerative medicine, cellular engineering, medical engineering, and biosensors, as well as material engineering such as surface modification and designing of functional materials.

### BRIEF DESCRIPTION OF DRAWINGS

[0091] FIG. 1 shows analysis of aggregation of cells through observation under a microscope. FIG. 1A shows a model system for aggregation analysis. In FIG. 1A, an ellipse indicates a cell. A dark ellipse indicates a cell expressing mRFP (red fluorescent protein). A light ellipse indicates a cell expressing EGFP (green fluorescent protein). The top side of the center of FIG. 1A shows an aggregation pattern of cells when both cells have an aggregation action. The bottom row of the center shows an aggregation pattern of cells when only mRFP expressing cells have an aggregation action while EGFP expressing cells do not have an aggregation action. The third part from the left in FIG. 1A shows a pattern of abundance of cells when each aggregate of cells is divided into a 2 μm section. The right most side of FIG. 1A shows graphs counting each pattern of abundance of cells based on the ratio of cells emitting fluorescence of GFP. In the graphs, the horizontal axis represents the ratio of cells emitting fluorescence of GFP, showing that fluorescence of GFP was observed in, in order from the left, 0 to 20%, 20 to 40%, 40 to 60%, 60 to 80%, or 80 to 100% of cells. The vertical axis indicates the ratio of the number of sections found to have each ratio of cells emitting fluorescence of GFP. FIG. 1B shows an image of a cell aggregate formed by mixing an Acinetobacter sp. To15 strain expressing mRFP and a normal AtaA protein and an Acinetobacter sp. To15 strain expressing EGFP and a normal AtaA protein, and a histogram of the ratio of cells expressing EGFP in a small section. FIG. 1C shows an image of a cell aggregate formed by mixing an Acinetobacter sp. To15 strain expressing mRFP and a normal AtaA protein and a AtaA Acinetobacter sp. To15 strain expressing EGFP, and a histogram of the ratio of cells expressing EGFP in a small section.

[0092] FIG. 2 shows an aggregation experiment using a full length AtaA protein or a partially deficient strain. FIG. 2A shows the domain structure of, in order from the top, a full length AtaA protein, (1) AtaA with a structure that is deficient of Nhead, (2) AtaA with a structure that is deficient of a part of Nstalk, (3) AtaA with a structure that is deficient of a part of Nstalk, (4) AtaA with a structure that is deficient of a part of Nstalk, (5) AtaA with a structure that is deficient of Chead in addition to a part of Nstalk, and (6) AtaA with a structure that is deficient of the majority of Cstalk (while the FGG domain is preserved). FIG. 2B shows images of a cell aggregate formed by mixing an Acinetobacter sp. To15 strain expressing mRFP and a normal AtaA protein and an Acinetobacter sp. To15 strain expressing EGFP and a normal AtaA protein or the 6 types of partially deficient forms in FIG. 2A, and histograms of the ratio of cells expressing EGFP in a small section.

[0093] FIG. 3 shows that an Nhead recombinant protein has a secondary structure. FIG. 3A is a diagram that clearly shows, in order from the top, the construct design of an Nhead recombinant protein and the domain structure of an AtaA fragment portion of an Nhead recombinant protein.

[0094] FIG. 3B shows results of measurement of CD spectra of an Nhead recombinant protein. In FIG. 3B, the horizontal axis of the graph indicates wavelength (nm), and the vertical axis indicates CD (mdeg). FIG. 3C shows the amino acid sequence of an Nhead recombinant protein (AtaA₅₉₋₃₂₅-GCN4pII-His) and detailed explanation thereof.

[0095] FIG. 4 shows results of measuring an adhesive property of microorganisms by using a mutant deficient of a loop structure within the Nhead domain. The axis in the graph indicates results from using, in order from the left, AtaA deficient strain (ΔataA), wild-type (AtaA), ANhead deficient strain, Alst loop deficient strain, and Δ2nd loop deficient strain. Black bar graphs correspond to adhesion to a polystyrene plate, and gray bar graphs correspond to adhesion to a glass plate. The vertical axis of the graph indicates an adhesive property of microorganisms measured by A₅₉₀.

[0096] FIG. 5 shows the dispersion and self-aggregation property of E. coli recombinant Nhead. The horizontal axis of the graph indicates the size of purified Nhead (d. nm), and the vertical axis indicates the volume of purified Nhead (percent).

[0097] FIG. 6 shows microscope pictures of an aggregate of an Acinetobacter sp. To15 strain. The left side shows a microscope picture of an aggregate of an Acinetobacter sp. To15 strain, and the right side shows a microscope picture from when an AVL peptide was added to an Acinetobacter sp. To15 stain.

[0098] FIG. 7 shows an adhesive property of E. coli recombinant Nhead measured by QCM-D. FIG. 7A shows adhesion to a polystyrene sensor. FIG. 7B shows adhesion to a silica sensor. In each graph, the vertical axis indicates the amount of adhesion by a Δf7/7 (Hz) value, and the horizontal axis indicates time. Each arrow in the graphs indicates, in order from the left, time at which 50 pg/ml of Nhead was added, time at which Nhead was added again, time at which the sample was rinsed, time at which 0.1 mM of AVL peptide was added, and time at which the sample was rinsed again.

[0099] FIG. 8 shows the self-aggregation property and microorganism immobilization rates of a bacterial strain expressing an AtaA variant of WChead prepared from substituting Nhead of full length AtaA with Chead. FIG. 8A shows a self-aggregation property of a strain that does not express AtaA (ΔAtaA), wild-type strain (AtaA), strain that expresses AtaA deficient of Nhead (ANhead), and strain that expresses an AtaA variant of WChead (WChead). FIG. 8B shows the immobilization rates of the wild-type strain (AtaA), strain that expresses AtaA deficient of Nhead (ANhead), and strain that expresses an AtaA variant of WChead (WChead) to a polystyrene surface or glass surface.

[0100] FIG. 9 shows that an Nhead-SNAP fusion peptide has a secondary structure. FIG. 9A is a diagram that clearly shows, in order from the top, the construct design of an Nhead-SNAP fusion peptide and domain structure of the AtaA fragment portion of an Nhead-SNAP fusion peptide. FIG. 9B shows results of measuring CD spectra of an Nhead-SNAP fusion peptide. In FIG. 9B, the horizontal axis of the graph indicates wavelength (nm), and the vertical axis indicates CD (mdeg). FIG. 9C shows the amino acid sequence of an Nhead-SNAP fusion peptide (AtaA₅₉₋₃₂₅-GCN4pII-SNAP-His) and detailed explanation thereof.

[0101] FIG. 10 shows immobilization of an Nhead-SNAP fusion peptide onto various material surfaces. FIG. 10A shows a model for testing immobilization of an Nhead-SNAP fusion peptide onto various material surfaces with a fluorescent molecule substrate of a SNAP protein fused to Nhead, corresponding to the steps of, in order from the left, adding an Nhead-SNAP fusion peptide dropwise onto the material surface, adding a fluorescent molecule substrate dropwise, washing, and measuring fluorescence. FIG. 10B shows fluorescence when an Nhead-SNAP fusion peptide or SNAP protein alone adhered to various materials. The columns in the picture show, in order from the left, glass, polystyrene, titanium, and polytetrafluoroethylene resin material. The rows in the picture show fluorescence when, in order from the top, no protein is adhering thereto, an Nhead-SNAP fusion peptide is adhering thereto, and a SNAP protein is adhering thereto.

[0102] FIG. 11 shows the antimicrobial property of the surface when an antimicrobial peptide CAP18 with an addition of a benzylguanyl (BG) group was immobilized on a polystyrene surface via an Nhead-SNAP fusion peptide. The columns of the picture indicate, in order from the left, a surface with nothing adhering thereto, a surface with an Nhead-SNAP fusion peptide adhering thereto, and surface with a SNAP protein adhering thereto. The rows of the picture indicate, in order from the top, an antimicrobial peptide was not allowed to act on the surface (not coated with an antimicrobial peptide) and an antimicrobial peptide was allowed to act on the surface (coated with an antimicrobial peptide). The portions that appear white in each picture indicate fluorescence from Pseudomonas aeruginosa (fluorescently stained) adhering to the material surface. Less white portions indicates that microorganisms are not adhering from sterilization, and thus a higher antimicrobial property. The picture in the middle of the bottom row hardly has any white portion compared to other pictures and is found to have a high antimicrobial effect on Pseudomonas aeruginosa.

[0103] FIG. 12 shows that a SNAP-Nhead fusion peptide with a SNAP protein at the N-terminus has a secondary structure. FIG. 12A is a diagram that clearly shows, in order from the top, the construct design of a SNAP-Nhead fusion peptide and domain structure of the AtaA fragment portion of a SNAP-Nhead fusion peptide. FIG. 12B shows results of measuring CD spectra of a SNAP-Nhead fusion peptide. In FIG. 12B, the horizontal axis of the graph indicates wavelength (nm), and the vertical axis indicates CD (mdeg). FIG. 12C shows the amino acid sequence of a SNAP-Nhead fusion peptide (SNAP-AtaA₆₀₋₃₂₅-GCN4pII-His) and detailed explanation thereof.

[0104] FIG. 13 shows a comparison of a SNAP protein fused to the N-terminus side of Nhead (SNAP-Nhead) and that fused to the C-terminus side (Nhead-SNAP). The graph shows a comparison of adhesive properties between an Nhead-SNAP fusion peptide and a SNAP-Nhead fusion peptide. The vertical axis of the graph indicates the fluorescence intensity at 535 nm, and the horizontal axis indicates, in order from the left, no adhesion, adhesion of an Nhead-SNAP fusion peptide, adhesion of a SNAP-Nhead fusion peptide, and adhesion of a SNAP protein. The black bars in the graph indicate fluorescence intensity from no addition of BG-lated CAP18 (BG), and white bars indicate fluorescence intensity from addition of BG-lated CAP18 (BG). The difference between black and white bars indicates an amount of fluorescent substrate that can no longer adhere due to adhesion of BG-lated CAP18, i.e., an amount corresponding to the amount of adhesion of BG-lated CAP18.

[0105] FIG. 14 shows that an Nhead-SNAP fusion peptide which does not use a GCN4pII tag has a secondary structure. FIG. 14A is a diagram that clearly shows, in order from the top, the construct design of an Nhead-SNAP_ΔGCN4pII fusion peptide and domain structure of the AtaA fragment portion of an Nhead-SNAP_ΔGCN4pII fusion peptide. FIG. 14B shows results of measuring CD spectra of an Nhead-SNAP_ΔGCN4pII fusion peptide. In FIG. 14B, the horizontal axis of the graph indicates wavelength (nm), and the vertical axis indicates CD (mdeg). FIG. 14C shows the amino acid sequence of an Nhead-SNAP_ΔGCN4pII fusion peptide (AtaA₅₉₋₃₂₅-SNAP-His) and detailed explanation thereof.

[0106] FIG. 15 shows that a (GCC)Nhead-SNAP fusion peptide with a tip coiled coil region at the N-terminus of Nstalk deleted has a secondary structure. FIG. 15A is a diagram that clearly shows, in order from the top, the construct design of an Nhead-SNAP_ΔCC fusion peptide with a deleted coiled coil, which is a part of an FGG domain at the tip of the N-terminus of Nstalk, and domain structure of the AtaA fragment portion of an Nhead domain-SNAP_ΔCC fusion peptide. FIG. 15B shows results of measuring CD spectra of an Nhead-SNAP_ΔCC fusion peptide. In FIG. 15B, the horizontal axis of the graph indicates wavelength (nm), and the vertical axis indicates CD (mdeg). FIG. 15C shows the amino acid sequence of an Nhead-SNAP_ΔCC fusion peptide (AtaA₅₉₋₃₁₄-GCN4pII-SNAP-His) and detailed explanation thereof.

[0107] FIG. 16 shows results of immobilization tests for various Nhead-SNAP fusion peptides shown in FIGS. 9, 14, and 15. The results are shown from measuring the amount of immobilization of fluorescent molecule substrate from the fluorescence intensity of a fluorescent molecule that forms a covalent bond with a SNAP protein, which is a substrate of the SNAP protein. The graph shows the results of fluorescent molecule immobilization tests from coating a polystyrene (PS) plate with, in order from the left, Non (only added a fluorescent molecule substrate with no coating of protein), Nhead-SNAP fusion peptide, Nhead-SNAP_ΔGCN4pII fusion peptide, and Nhead-SNAP_ΔCC fusion peptide. The vertical axis of the graph indicates the value of fluorescence (535 nm).

[0108] FIG. 17 shows that E. coli recombinant Nhead and streptavidin form a complex. The graph shows results of measuring the particle size of Nhead or streptavidin (SA) alone or a mixture thereof by dynamic light scattering (DLS). The horizontal axis of the graph indicates the particle size, and the vertical axis indicates the abundance ratio of particles by volume ratio. The lines with a peak near the particle size of 10 nm correspond to the measurement results for Nhead alone and SA alone, and the line with a peak at a particle size exceeding 1000 nm corresponds to the measurement results for the complex of Nhead and SA in the graph.

[0109] FIG. 18 shows that E. coli recombinant Nhead binds to neutral adivin. The graph shows results of measuring the particle sizes of Nhead alone, neutral avidin alone, and mixture thereof by dynamic light scattering (DLS). The horizontal axis of the graph indicates the particle size (nm), and the vertical axis indicates the abundance ratio (volume 5) of each particle. The horizontal axis of the graph indicates the particle size, and the vertical axis indicates the abundance ratio of particles by volume ratio. The lines with a peak near the particle size of 10 nm correspond to the measurement results for Nhead alone and neutral avidin alone, and the line with a peak at a particle size exceeding 1000 nm corresponds to the measurement results for the complex of Nhead and neutral avidin in the graph.

[0110] FIG. 19 is a result of a comparative example showing that E. coli recombinant Nhead does not bind to or form a complex with avidin. The graph shows results of measuring the particles sizes of Nhead alone, avidin alone, and mixture thereof by dynamic light scattering (DLS). The horizontal axis of the graph indicates the particle size, and the vertical axis indicates the abundance ratio of particles by volume ratio.

[0111] FIG. 20 shows immobilization of bacteria onto a plate coated with E. coli recombinant Nhead on the surface. FIG. 20A shows an experimental system for detecting immobilization of bacteria. FIG. 20B shows pictures of immobilized Bacillus subtilis on the left side, and pictures of immobilized E. coli on the right side. For each bacteria, the pictures show pictures from instances where, in order from left, no coating was applied, BSA coating was applied, and Nhead coating was applied. In each picture, fluorescently stained bacterial cells appear white.

[0112] FIG. 21 shows analysis of particles of liposomes prepared by immobilizing an Nhead-SNAP fusion peptide onto the surface layer (Nhead surface layer modified liposomes). In FIG. 21, the vertical axis of the graph indicates the number based ratio (5) for each diameter of liposome, and the horizontal axis indicates the diameter of liposome.

[0113] FIG. 22 shows immobilization of a liposome prepared by immobilizing an Nhead-SNAP fusion peptide onto the surface layer (Nhead surface layer modified liposome). In FIG. 22, the vertical axis of the graph indicates the fluorescence intensity of Alexa Fluor 647, and the horizontal axis shows results for Nhead surface layer modified liposomes mediated by a benzylguanyl (BG) group when 0 μM, 1 μM, or 10 μM of Nhead-SNAP fusion peptide was added, respectively, and a normal liposome without modification.

[0114] FIG. 23 shows the construct design of an E. coli recombinant Nhead Nstalk (NhNs)-SNAP fusion peptide. The top row shows the full length of an ApaA protein, and the bottom row shows an NhNs-SNAP fusion peptide. The full length sequence on the top row shows the domain group structure of an AtaA protein, corresponding to, in order from the left, SP (signal peptide), Nhead, Nstalk, Chead, Cstalk, and TM (membrane anchor) domain. The bottom row shows the configuration of a fusion peptide, corresponding to, in order from the left, Nhead, Nstalk, GCN4 adaptor, SNAP protein, and Strep tag.

[0115] FIG. 24 shows microscope pictures of an NhNs fiber surface layer modified liposome and a normal liposome as a control. The left side is a picture of an NhNs fiber surface layer modified liposome, and the right side is a picture of an unmodified normal liposome (control).

[0116] FIG. 25 shows results of analyzing the particle shape of an NhNs fiber surface layer modified liposome by DLS. FIG. 25A shows results of analyzing an Acinetobacter sp. To15 strain and GataA mutant strain suspended in pure water by DLS for comparison. White dots indicate results for the Acinetobacter sp. To15 strain, and the gray dots indicate results for the GataA mutant strain. FIG. 25B is a diagram showing that To15 strain cells do not self-aggregate in pure water. FIG. 25C shows results of analyzing an NhNs fiber surface layer modified liposome and unmodified liposome by DLS. White dots indicate results for the NhNs fiber surface layer modified liposome, and the gray dots indicate results for the unmodified liposome.

[0117] FIG. 26 shows an adhesion assay using an NhNs fiber surface layer modified liposome. FIG. 26A shows results of an experiment for adhesion of a liposome to a polystyrene plate. The left side shows results of adhesion of an NhNs fiber modified liposome by using a benzylguanyl group (BG) liposome, and the right side shows results of adhesion of a control unmodified liposome by using an egg phosphatidylcholine (PC) liposome. FIG. 26B shows results of an experiment for adhesion of a liposome to a glass plate. The left side shows results of adhesion of an NhNs fiber surface layer modified liposome, and the right side shows results of adhesion of a control unmodified liposome. FIG. 26C shows results of an enzymatic reaction test using an NhNs fiber modified liposome, which encapsulates β glucuronidase (GUS) and is immobilized onto a polystyrene plate. In the graph, the line indicating data with circles corresponds to data for an NhNs fiber surface layer modified liposome encapsulating GUS, and the line indicating data with triangles corresponds to data for an unmodified liposome encapsulating GUS, and the line indicating data with squares corresponds to data for an NhNs fiber surface layer modified liposome free of GUS.

[0118] FIG. 27 shows that a SpyCatcher-Nhead fusion peptide fused to SpyCatcher has a secondary structure. FIG. 27A is a diagram that clearly shows, in order from the top, the construct design of a SpyCatcher-Nhead fusion peptide and domain structure of the AtaA fragment portion of a SpyCatcher-Nhead fusion peptide. FIG. 27B shows the amino acid sequence of a SpyCatcher-Nhead fusion peptide (SpyCatcher-AtaA₅₉₋₃₂₅-GCN4pII-His) and detailed explanation thereof. FIG. 27C shows results of CBB staining of a SpyCatcher-Nhead fusion peptide. In FIG. 27C, the left side shows the molecular weight, and the arrow on the right side indicates the molecular weight of a SpyCatcher-Nhead fusion peptide. FIG. 27D shows results of measuring the CD spectra of a SpyCatcher-Nhead fusion peptide. In FIG. 27D, the horizontal axis of the graph indicates wavelength (nm), and the vertical axis indicates CD (mdeg).

[0119] FIG. 28 shows that a SpyTag-GFP fusion peptide fused to SpyTag has a secondary structure. FIG. 28A shows the construct design of SpyTag-GFP. FIG. 28B shows the amino acid sequence of a SpyTag-GFP fusion peptide (SpyTag-GFP-His) and detailed explanation thereof.

[0120] FIG. 28C shows results of CBB staining of a SpyTag-GFP fusion peptide. In FIG. 28C, the left side shows the molecular weight, and the arrow on the right side indicates the molecular weight of a SpyTag-GFP fusion peptide. FIG. 28D shows results of measuring the CD spectra of a SpyTag-GFP fusion peptide. In FIG. 28D, the horizontal axis of the graph indicates wavelength (nm), and the vertical axis indicates CD (mdeg).

[0121] FIG. 29 shows that SpyCatcher-Nhead binds to SpyTag-GFP. FIG. 29A shows an experimental system for detecting binding of SpyCatcher-Nhead to SpyTag-GFP. FIG. 29B shows results of detecting binding of SpyCatcher-Nhead to SpyTag-GFP by CBB staining. In FIG. 29B, CBB staining data corresponds to, in order from the left, molecular weight marker, SpyTag-GFP alone, SpyCatcher-Nhead alone, and mixture of SpyCatcher-Nhead and SpyTag-GFP. The left side shows the molecular weight, and the arrows on the right side indicate the molecular weights of GFP-Nhead binding product, SpyCatcher-Nhead fusion peptide, and SpyTag-GFP fusion peptide.

[0122] FIG. 30 shows that SpyTag-GFP can be immobilized onto a polystyrene plate via SpyCatcher-Nhead. FIG. 30A shows a model diagram for immobilizing SpyTag-GFP by immobilizing SpyCatcher-Nhead onto a polystyrene (PS) plate and binding SpyTag-GFP thereto. FIG. 30B shows results of measuring the amount of immobilization of GFP using fluorescence intensity of GFP. The graph shows results of GFP molecule immobilization test from coating a polystyrene plate using, in order from the left, SpyTag-GFP alone, SpyTag-GFP and Nhead, and SpyTag-GFP and SpyCatcher-Nhead. The vertical axis of the graph indicates the relative fluorescence intensity (excitation wavelength of 485 nm/fluorescence wavelength of 535 nm).

### DESCRIPTION OF EMBODIMENTS

[0123] The present disclosure is described hereinafter while showing the best mode thereof. Throughout the entire specification, a singular expression should be understood as encompassing the concept thereof in the plural form, unless specifically noted otherwise. Thus, singular articles (e.g., “a”, “an”, “the”, and the like in the case of English) should also be understood as encompassing the concept thereof in the plural form, unless specifically noted otherwise. Further, the terms used herein should be understood as being used in the meaning that is commonly used in the art, unless specifically noted otherwise. Therefore, unless defined otherwise, all terminologies and scientific technical terms that are used herein have the same meaning as the general understanding of those skilled in the art to which the present invention pertains. In case of a contradiction, the present specification (including the definitions) takes precedence.

[0124] The definitions of the terms and/or basic technical concepts that are particularly used herein are described hereinafter when appropriate.

[0125] (Definitions of Terms)

[0126] As used herein, “adhere, adhesion” and “immobilize, immobilization” are used interchangeably and used in the sense commonly used in the art, and mean to make at least a portion of the subject of “adhesion” or “immobilization” at least relatively immobile from a certain position on the subject to be adhered or immobilized.

[0127] As used herein, “aggregate, aggregation” is used in the sense commonly used in the art and means that polypeptides or the like, in their dispersed state, gather in a mass with the polypeptides themselves, with other polypeptides or the like. Particularly when the same type of polypeptide chains aggregate together, it is referred to as self-aggregate, self-aggregation. For example, as to AtaA, the aggregation of multiple AtaA causes the phenomenon of forming a mass; thus, AtaA can be considered as having self-aggregating ability. Since the adhesive polypeptides of the present disclosure do not have a self-aggregation property, the polypeptides would not adhere in layers in one example. Thus, it is advantageous in the situation where the laminated adhesion is not preferable.

[0128] By lacking a self-aggregation property, polypeptides in an adhesive composition can disperse homogeneously to produce a state with homogeneous stress, so that the composition can more firmly adhere or immobilize.

[0129] In addition, a property of not self-aggregating while maintaining adhesion is useful in the following applications. Specifically, the adhesive polypeptide of the present disclosure is useful in controlling a function of a fused product and functionality-imparting entity in a separation process in pharmaceutical/chemical product industries, regenerative medicine, cell engineering, medical engineering, biosensors, and material engineering such as surface modification and designing of functional materials by causing adhesion or immobilization of the fused product or functionality-imparting entity in a single layer.

[0130] As used herein, “bind” and “bound” are used in the sense commonly used in the art and means a physical or chemical association between two substances, or a combination thereof. In particular, in the present disclosure, the interaction between adhesive polypeptide and streptavidin, neutral avidin, variants thereof, or the like falls under the “bind” herein. As used herein, “binding” is also referred to as “specific binding” because it corresponds to a specific interaction. On the other hand, adhesion or immobilization is due to non-specific interactions.

[0131] As used herein, “separation” and “separate” are used in the sense commonly used in the art and means that in two or more substances that are in a “bound” state, at least a part of the “bound” state between the substances is released.

[0132] As used herein, “disintegration” and “disintegrate” are used in the sense commonly used in the art and means that in two or more substances in an “aggregated” state, at least a part of the “aggregated” state between the substances is released.

[0133] As used herein, “AtaA” is a protein belonging to the trimeric autotransporter adhesin (TAA) family possessed by Gram-negative bacteria. AtaA forms a homotrimer and has a domain group structure with a signal peptide-Nhead-Nstalk-Chead-Cstalk-Membrane anchor arranged therein in this order from the amino terminal to the carboxy terminal. In addition, Nhead, Nstalk, Chead, and Cstalk include various domains such as Ylhead, Trp-ring, GIN and FGG, and also include some domains repeatedly. Respective domains are linked by a structure such as a neck or a coiled coil. The amino acid sequence and nucleic acid sequence of the fragment sequence of AtaA that does not include a signal peptide at the N-terminal but is added with methionine at the beginning and the binding site for the outer membrane of a microorganism cell is deleted so that it is in a separated state from the cell are shown in SEQ ID NOs: I and 2, respectively. In SEQ ID NOs: 1 and 2, Nhead (including Neck) corresponds to amino acid positions 2 to 258 and nucleic acid positions 4 to 774, Nstalk corresponds to amino acid positions 259 to 2846 and nucleic acid positions 775 to 8538, Chead (not including Neck) corresponds to amino acid positions 2855 to 3093 and nucleic acid positions 8563 to 9279, and Cstalk (including p-barrel inclusions) corresponds to amino acid positions 3094 to 3518 and nucleic acid positions 9280 to 10554. In addition, in the Nhead domain, there are two loop structures that are related to adhesive property, where these loop structures correspond to amino acid positions 22-50 and 161-175, and nucleic acid positions 64-150 and 481-525, respectively. Chead can be associated with self-aggregation.

[0134] As used herein, “Acinetobacter” means the genus Acinetobacter in the taxonomy. The genus Acinetobacter typically includes the Acinetobacter sp. To15 strain. The Acinetobacter sp. To15 strain is a strain with toluene resolution ability, isolated from the exhaust gas treatment reactor and is available from Katsutoshi Hori Laboratory, Nagoya University. The adhesive peptide of the present disclosure include, but are not limited to, those produced with the Acinetobacter sp. To15 strain belonging to the genus Acinetobacter.

[0135] As used herein, the “functionality-imparting entity” is used in the sense commonly used in the art and means those that have any functions or actions. The functionality-imparting entity is bound by the adhesive polypeptide or fragment thereof in the present disclosure. The functions or actions are typically various functions or actions useful in a separation process in pharmaceutical/chemical product industries, regenerative medicine, cell engineering, medical engineering, biosensors, material engineering such as surface modification and designing of functional materials and the like, and include, but are not limited to, functions such as labeling. In one embodiment, the functionality-imparting entity is a protein and/or peptide. In a specific embodiment, the functionality-imparting entity is streptavidin, neutral avidin or a variant thereof. In another embodiment, a functionality-imparting entity is a cell.

[0136] As used herein, “streptavidin” is used in the sense commonly used in the art and means streptavidin produced by the genus Streptomyces, or variants, derivatives or equivalents thereof. Examples of the amino acid sequence thereof include, but are not limited to, P22629-1, and examples of the nucleic acid sequence thereof include, but are not limited to, those specified by X03591. The “streptavidin” herein typically binds to biotin with high affinity. As used herein, “neutral avidin” is used interchangeably with “NeutrAvidin” and the like in the same sense, and means a variant of avidin (particularly, a sugar chain-removed substance) which has a pI value near neutrality and in which non-specific binding is suppressed. “Neutral avidin” also typically binds to biotin with high affinity. “Streptavidin” and “neutral avidin” have the property of specifically binding to the adhesive polypeptide of the present disclosure.

[0137] As used herein, “liposome” is used in a meaning that is commonly used in the art, referring to a spherical self-aggregated entity formed by amphiphilic molecules including a polar hydrophilic group and a lipophilic lipid group, which is a vesicle forming a substantially closed structure in an aqueous medium and having a lipid bilayer structure. A liposome can include a DNA, protein, peptide, or the like inside. In a specific embodiment, a liposome is used as a transport vesicle. In another embodiment, a liposome is useful as an artificial cell.

[0138] As used herein, a “corresponding” amino acid or nucleic acid or moiety refer to: an amino acid or nucleotide that has or is expected to have a similar action as a given amino acid or nucleotide or moiety in the polypeptide or polynucleotide to be used as a reference for comparison, in a certain polypeptide or polynucleotide molecule (e.g., AtaA and the like); and for adhesive polypeptides in particular, an amino acid that is present at similar positions in the site which is essential for adhesion and makes a similar contribution to adhesive property. For example, as for an antisense molecule, it can be a similar part in the ortholog corresponding to a particular part of the antisense molecule. The corresponding amino acid can be, for example, a specific amino acid that is cysteinylated, glutathioneized, S-S bond formed, oxidized (e.g., methionine side chain oxidation), formylated, acetylated, phosphorylated, glycosylated, myristilized, and the like. Alternatively, the corresponding amino acid can be the amino acid responsible for trimerization. Such a “corresponding” amino acid or nucleic acid may be a region or domain over a certain range. Therefore, in such cases, they are referred to herein as a “corresponding” region or domain.

[0139] As used herein, “fusion” means that two or more molecules (e.g., polypeptides or nucleic acids) or parts thereof are linked by covalent binding. When two or more moieties are polypeptides and they form a covalently bound complex, they are fusions or fusion products produced by “fusion”, or fusion proteins or fusion peptides, which can also be referred to as chimeric peptides. Regularly, in the case of a polypeptide fusion, a fusion of nucleic acids is prepared by linking the base sequences of nucleic acids encoding two types of polypeptides, and the fusion is used as a design drawing to produce a fusion peptide as a recombinant protein.

[0140] As used herein, “complex” is used in the sense commonly used in the art and means any construct including two or more moieties. For example, if one of the moieties is a polypeptide, the other of the moieties may be a polypeptide or any other substances (e.g., sugars, lipids, nucleic acids, other hydrocarbons, cells, etc.). Two or more moieties that constitute the complex herein can be bound in a non-covalent manner (e.g., hydrogen bond, ionic bond, hydrophobic interaction, van der Waals force, and the like). Therefore, as used herein, the “complex” includes molecules formed by linking a plurality of types of molecules, such as polypeptides, polynucleotides, lipids, sugars, and small molecules. A complex formed through a bond other than a covalent bond can be separately into two or more portions by a simple method. Examples of the simple method include operations such as application of a shear stress by physical means such as stirring, addition of a compound, changing solution conditions such as pH or salt concentration, and changing the temperature.

[0141] It is well known in the art that an amino acid can be substituted with another amino acid having the same hydrophobicity index to still produce a protein with the same biological function (e.g., protein with equivalent adhesive property). In such an amino acid substitution, hydrophobicity index is preferably within ±2, more preferably within ±1, and still more preferably within ±0.5. It is understood in the art that such an amino acid substitution based on hydrophobicity is efficient. A hydrophilicity index is also considered for the preparation of variants. As described in U.S. Pat. No. 4,554,101, the following hydrophilicity indices are assigned to amino acid residues: arginine (+3.0); lysine (+3.0); aspartic acid (+3.0 ±1); glutamic acid (+3.0 ±1); serine (+0.3); asparagine (+0.2); glutamine (+0.2); glycine (0); threonine (−0.4); proline (−0.5 ±1); alanine (−0.5); histidine (−0.5); cysteine (−1.0); methionine (−1.3); valine (−1.5); leucine (−1.8); isoleucine (−1.8); tyrosine (−2.3); phenylalanine (−2.5); and tryptophan (−3.4). It is understood that an amino acid can be substituted with another amino that has the same hydrophilicity index and can still provide a biological equivalent. In such an amino acid substitution, the hydrophilicity index is preferably within ±2, more preferably within ±1, and still more preferably within ±0.5.

[0142] In the present disclosure, “conservative substitution” means a substitution in which the hydrophilicity index and/or the hydrophobicity index of the substituting amino acid is similar to that of the original amino acid as described above. Examples of the conservative substitution are well known to those of skill in the art and include, but are not limited to, for example, substitutions within each of the following groups: arginine and lysine; glutamic acid and aspartic acid; serine and threonine; glutamine and asparagine; and valine, leucine, isoleucine, and the like.

[0143] The “variant”, “derivative”, “analog” or “mutant” (of adhesive polypeptides and the like) as used herein are used interchangeably, and the above terms preferably include molecules including regions that are substantially homologous to the protein (e.g., adhesive polypeptide) of interest, although not intended to be limiting; and in the case of amino acid sequence, nucleic acid sequence (nucleotide sequence, base sequence), such sequences are referred to as “altered sequence”, “derived sequence”, “analogous sequence”, and “mutated sequence”. Such molecules, in various embodiments, are at least 30%, 40%, 50%, 60%, 70%, 80%, 90%, 95%, or 99% identical, throughout amino acid sequences of the same size, or in comparison with sequences to be aligned by conducting alignment with a computer homology program that is known in the art; or nucleic acids encoding such molecules can hybridize to sequences encoding component proteins under (highly) stringent, moderately stringent, or non-stringent conditions. This means that each is a product of protein alteration by amino acid substitutions, deletions and additions, in which the variant or derivative thereof still exhibits the biological function of the original protein, but not necessarily to the same degree. The variant may have a sequence that is preferably 70% or more identical, more preferably 80% or more identical, even more preferably 90% or more identical, still even more preferably 95% or more identical, 98% or more identical, 99% or more identical, to the original sequence. For example, it is also possible to investigate the biological function of such a protein by appropriate and available in vitro assays described herein or known in the art. “Functionally active” as used herein refers to a polypeptide, i.e., a fragment or derivative, having a structural, regulatory, or biochemical function of protein, such as biological activity, according to aspects to which the polypeptide, i.e., the fragment or derivative, of the present disclosure is associated herein. Accordingly, in one embodiment, the variant of the present disclosure refers to a functional equivalent.

[0144] As used herein, a fragment of an adhesive polypeptide is a polypeptide comprising any region of the adhesive polypeptide, which does not necessarily need to have all of the biological functions of a naturally-occurring adhesive polypeptide, as long as it function as intended in the present disclosure (e.g., immobilize and/or adhere without self-aggregation).

[0145] As used herein, “protein”, “polypeptide”, “oligopeptide”, and “peptide” are used with the same meaning herein and refer to a polymer of amino acids of any length. The length of the protein, polypeptide, or peptide of the present disclosure is preferably at least 237 amino acid residues and at most 3364 amino acid residues, and more preferably at least 256 amino acid residues and at most 2846 amino acid residues. The polymer may be linear, branched or cyclic. The amino acids may be natural or non-natural, or may be altered amino acids. The term may also include those assembled into a complex of multiple polypeptide chains. The term also includes naturally or artificially altered amino acid polymers. Such alterations include, for example, disulfide bond formation, glycosylation, lipidation, acetylation, phosphorylation, methylation, trimethylation or any other manipulation or alteration (e.g., conjugation with a labeling component)

[0146] This definition also includes, for example, polypeptides including one or more analogs of amino acids (including, for example, unnatural amino acids), peptide-like compounds (e.g., peptoids) and other alterations known in the art. As used herein, “amino acid” is a general term for organic compounds having an amino group and a carboxyl group. When the polypeptide according to the embodiments of the present disclosure includes a “specific amino acid sequence”, any amino acid in the amino acid sequence may be chemically modified. In addition, any amino acid in the amino acid sequence may form a salt or a solvate. Furthermore, any amino acid in the amino acid sequence may be L-type or D-type. Even in such cases, the protein according to the embodiments of the present disclosure can be said to include the above “specific amino acid sequence”. As to the chemical modification that an amino acid included in a protein undergoes in vivo, knowns are, for example, N-terminal modification (e.g., acetylation, myristoylation, etc.), C-terminal modification (e.g., amidation, glycosylphosphatidylinositol addition, etc.), side chain modification (e.g., phosphorylation, sugar chain addition, etc.) or the like. The amino acids may be any natural or non-natural amino acids that satisfy the objectives of the present disclosure.

[0147] As used herein, “polynucleotide”, “oligonucleotide” and “nucleic acid” are used with the same meaning herein and refer to a polymer of nucleotide of any length. The term also includes an “oligonucleotide derivative” or “polynucleotide derivative”. The “oligonucleotide derivative” or “polynucleotide derivative” refers to an oligonucleotide or polynucleotide that includes a derivative of a nucleotide or has an unusual bond between nucleotides and is used interchangeably. Specific examples of such oligonucleotides include, for example 2′-O-methyl-ribonucleotide, an oligonucleotide derivative in which the phosphate diester bond in the oligonucleotide is converted to a phosphorothioate bond, an oligonucleotide derivative in which the phosphate diester bond in the oligonucleotide is converted to an N3′-P5′phosphodiester bond, an oligonucleotide derivative in which a ribose and a phosphate diester bond in the oligonucleotide are converted into a peptide nucleic acid bond, an oligonucleotide derivative in which uracil in the oligonucleotide is substituted by C-5 propvnvl uracil, an oligonucleotide derivative in which uracil in the oligonucleotide is substituted by C-5 thiazole uracil, an oligonucleotide derivative in which cytosine in the oligonucleotide is substituted by C-5 propynylcytosine, an oligonucleotide derivative in which cytosine in the oligonucleotide is substituted by phenoxazine-modified cytosine, an oligonucleotide derivative in which ribose in DNA is substituted by 2′-0-propylribose, and an oligonucleotide derivative in which ribose in the oligonucleotide is substituted by 2′-methoxyethoxyribose. Unless otherwise indicated, the specific nucleic acid sequence is also intended to include sequences that are explicitly shown, as well as the conservatively altered variants (e.g., a degenerate codon substitution) and complementary sequences thereof. Specifically, the degenerate codon substitution can be achieved by creating a sequence in which the third position of one or more selected (or all) codons is substituted by a mixed base and/or deoxyinosine residue (Batzer et al., Nucleic Acid Res.19:5081(1991); Ohtsuka et al., J. Biol. Chem. 260: 2605-2608(1985); Rossolini et al., Mol. Cell. Probes 8:91-98(1994)). As used herein, “nucleic acid” is also used interchangeably with genes, cDNAs, mRNAs, oligonucleotides, and polynucleotides. As used herein, “nucleotide” may be natural or non-natural.

[0148] As used herein, “gene” means a factor that defines a genetic trait, and “aerie” may also refer to “polynucleotide”, “oligonucleotide” and “nucleic acid”.

[0149] As used herein, “homology” of a gene means the degree of identity of two or more gene sequences to each other, and generally, having “homology” means a high degree of identity or similarity. Thus, as the homology of two certain genes increases, the identity or similarity of the sequences thereof increases. Whether or not two types of genes are homologous can be determined by direct comparison of the sequences, or in the case of nucleic acids, can be examined by hybridization methods under stringent conditions. In direct comparison of two gene sequences, the genes thereof are homologous if the DNA sequences are typically at least 50% identical, preferably at least 70% identical, more preferably at least 80%, 90%, 95%, 96%, 97%, 98% or 99% identical, between the gene sequences. Similarly, the concept of “homology” also applies to amino acid sequences, in which case the numerical values of identity etc. can be interpreted by replacing them with amino acid sequences. Accordingly, as used herein, “homolog” or “homologous gene product” means a protein in another species, preferably a microorganism, more preferably a bacterium, which exerts the same biological function as the protein component of the fusion or the like to be further described herein. Such a homolog is also sometimes referred to as an “ortholog gene product”. It is understood that such a homolog, homologous gene product, ortholog gene product, etc. can also be used as long as they meet the objectives of the present disclosure.

[0150] Amino acids may be mentioned herein by either their commonly known three letter symbols or their one character symbols recommended by the IUPAC-IUB Biochemical Nomenclature Commission. Similarly, nucleotides may be mentioned by their commonly recounized one character codes. Comparison of similarity, identity, and homology of an amino acid sequence and a base sequence is calculated herein by using a sequence analysis tool BLAST with default parameters. For example, identity can be searched using BLAST 2.7.1 (published on Oct. 19, 2017) of the NCBI. Herein, values for “identity” generally refer to a value obtained when aligned under the default conditions using BLAST. However, when a higher value is obtained by changing a parameter, the highest value is considered the value of identity. When identity is evaluated in a plurality of regions, the highest value thereamong is considered the value of identity. “Similarity” is a value calculated by taking into consideration a similar amino acid in addition to identity.

[0151] In one embodiment of the present disclosure, the “several” may be, for example, 10, 8, 6, 5, 4, 3, or 2, or less than or equal to any of these values. It is known that a polypeptide with one or several amino acid residue deletions, additions, insertions or substitutions with other amino acids, still maintains its biological activity (Mark et al., Proc Natl Acad Sci USA.1984 September; 81(18): 5662-5666., Zoller et al., Nucleic Acids Res. 1982 Oct 25; 10(20): 6487-6500., Wang et al., Science.1984 Jun. 29; 224(4656): 1431-1433.). Peptides with deletions and the like can be prepared, for example, by a site-specific mutagenesis method, a random mutagenesis method, or the like. As a site-specific mutagenesis method, for example, KOD-Plus-Mutagenesis Kit (TOYOBO CO., LTD.) can be used. It is possible to select a polypeptide having the same activity as the wild-type from the mutant-type polypeptides in which a deletion or the like has been introduced, by performing various characterizations such as FACS analysis and ELISA.

[0152] In one embodiment of the present disclosure, the numerical value of identity or the like, i.e., “70% or greater”, can be, for example, 70% or greater, 75% or greater, 80% or greater, 85% or greater, 90% or greater, 95% or greater, 96% or greater, 97% or greater, 98% or greater, 99% or greater, or 100% or greater, or within a range between any two of numerical values of such starting points. The above “identity” is computed by computing the ratio of the number of amino acids homologous in two or more amino acid sequences in accordance with a known method described above. Specifically, amino acid sequences in a group of amino acid sequences to be compared are aligned before computing the ratio, and a space is introduced in a part of the amino acid sequences if needed to maximize the ratio of identical amino acids. A method for alignment, ratio computation method, comparison method, and computer program associated therewith are conventional and well known in the art (e.g., aforementioned BLAST or the like). As used herein, “identity” and “similarity” can be represented by a value measured by NCBI's BLAST, unless specifically noted otherwise. Blastp can be used with the default settings as the algorithm for comparing amino acid or base sequences with BLAST. Measurement results are quantified as Positives or identities.

[0153] As used herein, a “polynucleotide that hybridizes under stringent conditions” refers to well-known conditions commonly used in the art. Such a polynucleotide can be obtained by using a polynucleotide selected from the polynucleotides of the present disclosure as a probe and using a colony hybridization method, a plaque hybridization method or a southern blot hybridization method. Specifically, the above means such a polynucleotide that can be identified by performing hybridization at 65° C. in the presence of 0.7 to 1.0 M NaCl using a filter with immobilized DNA from a colony or plaque, followed by washing the filter under 65° C. conditions with a 0.1 to 2-fold concentration SSC (saline-sodium citrate) solution (where the composition of the 1-fold concentration SSC solution is 150 mM sodium chloride and 15 mM sodium citrate). For the “stringent conditions”, the conditions below, for example, can be adopted: (1) use of low ionic strength and high temperature for washing (e.g., at 50° C., 0.015M sodium chloride/0.0015M sodium citrate/0.1% sodium dodecyl sulfate); (2) use of a denaturing agent such as formamide during hybridization (e.g., at 42° C., 50% (v/v) formamide and 0.1% bovine serum albumin/0.1% ficoll/0.1% polyvinylpyrrolidone/50 mM and pH 6.5 sodium phosphate buffer, and 750 mM sodium chloride, 75 mM citrate sodium), or (3) incubation overnight at 37° C. in a solution containing 20% formamide, 5 x SSC, 50 mM sodium phosphate (pH 7.6), 5 x denhard solution, 10% dextran sulfate, and 20 mg/ml denatured sheared salmon sperm DNA, followed by washing the filter with 1 x SSC at about 37 to 50° C. Note that the formamide concentration may be 50% or higher. Washing time may be 5, 15, 30, 60, or 120 minutes, or longer. Multiple factors such as temperature and salt concentration can be considered as factors that affect the stringency of the hybridization reaction, and for details, Ausubel et al., Current Protocols in Molecular Biology, Wiley Interscience Publishers, (1995) may be referenced. Examples of “highly stringent conditions” are 0.0015M sodium chloride, 0.0015M sodium citrate, 65 to 68° C., or 0.015M sodium chloride, 0.0015M sodium citrate, and 50% sodium citrate, at 42° C. Hybridization can be performed in accordance with the method described in experimental publications such as Molecular Cloning 2nd ed., Current Protocols in Molecular Biology, Supplement 1-38, DNA Cloning 1: Core Techniques, A Practical Approach, Second Edition, Oxford University Press (1995). In this regard, sequences containing only the A sequence or only the T sequence are preferably excluded from the sequences to be hybridized under stringent conditions. Moderate stringent conditions can be easily determined by one of ordinary skill in the art on the basis of, for example, the length of the DNA, shown in Sambrook et al., Molecular Cloning: A Laboratory Manual, No. 3, Vol.1, 7. 42-7. 45 Cold Spring Harbor Laboratory Press, 2001; and as to nitrocellulose filters, included are the use of: hybridization conditions with a pre-cleaning solution of 5 x SSC, 0.5% SDS, and 1.0 mM EDTA (pH 8.0), and at about 40 to 50° C., about 50% formamide, 2 x SSC-6 x SSC (or other similar hybridization solution, such as Stark's solution, in about 50% formamide at about 42° C.); and washing conditions of about 60° C., 0.5 x SSC, 0.1% SDS. Accordingly, the peptides used in this disclosure also include polypeptides coded by nucleic acid molecules that hybridize under highly or moderately stringent conditions to nucleic acid molecules that code the polypeptides specifically described in the present disclosure.

[0154] The adhesive polypeptides of the present disclosure may preferably be “purified” or “isolated”. A “purified” substance or biological factor (e.g., nucleic acid or protein) as used herein refers to one in which at least some of the factors naturally associated with the substance or biological factor have been removed. Thus, the purity of the biological factor in the purified biological factor is usually higher (i.e., enriched) than the purity of the biological factor in the state in which the biological factor is normally present. The term, “purified”, as used herein means that there is preferably at least 75% by weight, more preferably at least 85% by weight, even more preferably at least 95% by weight, and most preferably at least 98% by weight, of the same type of biological factor present. The substance or biological factor used in the present disclosure is preferably a “purified” substance. An “isolated” substance or biological factor (e.g., nucleic acid or protein) as used herein refers to one in which the factors naturally associated with the substance or biological factor have been substantially removed. The term, “isolated”, as used herein does not necessarily have to be expressed in purity as it varies in accordance with the objective thereof, but if necessary, means that there is preferably at least 75% by weight, more preferably at least 85% by weight, even more preferably at least 95% by weight, and most preferably at least 98% by weight, of the same type of biological factor present. The substance used in the present disclosure is preferably an “isolated” substance or biological factor.

[0155] As used herein, “fragment” refers to a polypeptide or polynucleotide with a sequence length of 1 to n−1 with respect to a full-length polypeptide or polynucleotide (with the length of n). The length of the fragment can be varied as appropriate according to the objective thereof, and the lower limit of the length thereof, in the case of polypeptides, includes, for example, 3, 4, 5, 6, 7, 8, 9, 10, 15, 20, 25, 30, 40, 50 and more amino acids; and lengths represented by integers not specifically listed here (e.g., 11) can also be appropriate as lower limits. A fragment of the polypeptide of the present disclosure consists of preferably 237 or more and 3364 or less amino acids and more preferably 256 or more and 2846 or less amino acids. Examples of the lower limit include, but are not limited to, 237 amino acids, 256 amino acids, 300 amino acids, 400 amino acids, 500 amino acids, 600 amino acids, 700 amino acids, 800 amino acids, 900 amino acids, 1000 amino acids, and the like. Examples of the upper limit include, but are not limited to, 1000 amino acids, 1100 amino acids, 1200 amino acids, 1300 amino acids, 1400 amino acids, 1500 amino acids, 1600 amino acids, 1700 amino acids, 1800 amino acids, 1900 amino acids, 2000 amino acids, 2100 amino acids, 2200 amino acids, 2300 amino acids, 2400 amino acids, 2500 amino acids, 2600 amino acids, 2700 amino acids, 2800 amino acids, 2846 amino acids, 2900 amino acids, 3000 amino acids, 3100 amino acids, 3200 amino acids, 3300 amino acids, and 3364 amino acids. The length can be any other length, as long as a desired property (e.g., lack of self-aggregation property or maintaining an adhesive property) is maintained. Further, in the case of polynucleotides, included are 5, 6, 7, 8, 9, 10, 15, 20, 25, 30, 40, 50, 75, 100 and more nucleotides; and lengths represented by integers not specifically listed here (e.g., 11) can also be appropriate as lower limits. As used herein, it is understood that such a fragment falls within the scope of the present disclosure, for example, if the full length one functions as an adhesive molecule, as long as the fragment itself also functions as an adhesive polypeptide.

[0156] As used herein, “biological function” refers to a specific function that a certain gene or a nucleic acid molecule or polypeptide associated therewith may have in vivo or in vitro in the context of the gene, nucleic acid molecule or polypeptide, the examples of which include, but are not limited to, for example, an adhesive property and the like. As used herein, the biological function can be exerted by the corresponding “biological activity”. As used herein, “biological activity” refers to the activity that a factor (e.g., polynucleotide, protein, etc.) may have, and includes activities that exert various functions (e.g., an adhesive property). The “biological activity” may be an activity exerted in vivo or an activity exerted in vitro by secretion or the like. For example, if a certain factor is an enzyme, the biological activity thereof includes the enzyme activity thereof. Such biological activity can be measured by techniques well known in the art. Thus, “activity” refers to various measurable indicators that indicate or reveal binding (either direct or indirect) or various measurable indicators that affect the response (i.e., have a measurable effect in response to some exposure or stimulus), which may also include, for example, affinities for compounds that directly bind to the polypeptides or polynucleotides of the present disclosure, or for example, the amount of upstream or downstream protein after some stimulus or event, or other similar scales of function.

[0157] As used herein, “expression” of a gene, polynucleotide, polypeptide or the like refers to the gene or the like to undergo a certain action in vivo thus turning into a different form. This preferably refers to a gene, a polynucleotide or the like to be transcribed and translated into the form of a polypeptide; however, it is also an aspect of the expression that they are transcribed to produce mRNA. Accordingly, the “expression product” as used herein includes such a polypeptide or protein, or mRNA. More preferably, the form of such a polypeptide may be the one that is post-translationally processed. For example, the expression level of an adhesive polypeptide can be determined by any method. Specifically, assessing the amount of mRNA of the adhesive polypeptide, the amount of the adhesive polypeptide, and the biological activity of the adhesive polypeptide allows finding out of the expression level of the adhesive polypeptide. The amount of mRNA of the adhesive polypeptide, polypeptide or protein can be determined by methods as detailed elsewhere herein or by other methods known in the art.

[0158] As used herein, “functional equivalent” means any entity that has the same objective function but a different structure with respect to the original entity of interest. Thus, it is understood that the functional equivalent of the “adhesive polypeptide” of the present disclosure is not the adhesive polypeptide of the present disclosure itself, but includes a mutant or variant thereof (e.g., an amino acid sequence variant or the like), which has a biological action of the adhesive polypeptide as well as such a functional equivalent (including, for example, a nucleic acid encoding the mutant or variant, a vector including the nucleic acid, a cell, and the like) which, at the time of action, can be transformed into a mutant or variant that has the biological action of the adhesive polypeptide. in the present disclosure, it is understood that the functional equivalent of the adhesive polypeptide can be used in the same manner as the adhesive polypeptide, without special mention. Functional equivalents can be found by searching databases and the like. As used herein, “searching” refers to finding another nucleic acid base sequence with a particular function and/or property by utilizing a certain nucleic acid base sequence electronically, biologically or otherwise. Examples of electronic searching include, but are not limited to, BLAST (Altschul et al., J. Mol. Biol. 215: 403-410(1990)), FASTA (Pearson & Lipman, Proc. Natl. Acad. Sci., USA 85:2444-2448 (1988)), Smith and Waterman method (Smith and Waterman, J. Nol. Biol. 147:195-197 (1981)), and Needleman and Wunsch method (Needleman and Wunsch, J. Nol. Biol. 48:443-453 (1970)). Examples of biological searching include, but are not limited to, stringent hybridization, microarrays with genomic DNA attached to nylon membranes, etc. or microarrays attached to glass plates (microarray assays), PCR and in situ hybridization. Herein, it is intended that the genes used in the present disclosure should also include the corresponding genes identified by such electronic and biological searching.

[0159] As for the functional equivalent of the present disclosure (polypeptide, etc.), it is possible to use amino acid sequences in which one or more amino acids are inserted, substituted or deleted, or added to one or both ends. As used herein, “one or more amino acids are inserted, substituted or deleted, or added to one or both ends” means that alterations have been made with the substituting of a plurality of amino acids that may occur naturally, by well-known technical methods such as site-specific mutagenesis methods, or by natural mutations. An altered amino acid sequence can have, for example, 1 to 30, preferably 1 to 20, more preferably 1 to 9, still more preferably 1 to 5, and particularly preferably 1 to 2 amino acid insertions, substitutions, or deletions, or additions to one or both ends thereof. The altered amino acid sequence may be preferably such an amino acid sequence that has one or more (preferably one or several, or 1, 2, 3, or 4) conservative substitutions in the amino acid sequence of SEQ ID NO: 1 or 4. “Conservative substitution” herein means a substitution of one or more amino acid residues with other chemically similar amino acid residues so as not to substantially alter the function of the protein. Examples thereof include substitutions of a hydrophobic residue with another hydrophobic residue, substitutions of a polar residue with another polar residue having the same charge, and the like. Functionally similar amino acids that can be substituted in this manner are known in the art for each amino acid. Specific examples include alanine, valine, isoleucine, leucine, proline, tryptophan, phenylalanine, methionine, and the like for nonpolar (hydrophobic) amino acids, and glycine, serine, threonine, tyrosine, glutamine, asparagine, cysteine, and the like for polar (neutral) amino acids. Examples of positively charged (basic) amino acids include arginine, histidine, lysine, and the like. Further, examples of a negatively-charged (acidic) amino acid include aspartic acid, glutamic acid, and the like.

[0160] As used herein, “support” refers to a substance capable of carrying a peptide, protein, polynucleotide, cell, bacterium, or virus and a sugar, lipid, or other low molecules. The material for use as a support can be any material that can form a solid surface, and examples thereof include, but are not limited to, a lipid double structure (e.g., liposome), glass, silica, silicon, ceramic, silicon dioxide, plastic, metal (including alloy), titanium, acrylic material, natural and synthetic polymer (e.g., polystyrene, polypropylene, polyethylene, polyvinyl chloride, cellulose, chitosan, dextran, nylon, polyurethane, polycarbonate, polylactic acid, and polytetrafluoroethylene (PTFE)).

[0161] As used herein, “kit” refers to a unit providing parts to be provided (e.g., an enzyme, buffer, user manual, and the like) which are generally separated into two or more segments. Such a kit form is preferred when providing a composition, which should not be provided in a mixed state for stability or the like and is preferably used by mixing immediately prior to use. Such a kit advantageously comprises an instruction or user manual describing how the provided parts (e.g., enzymes) are used or how a reagent or waste fluid after use should be processed. When a kit is used as a reagent kit herein, the kit generally comprises an instruction or the like describing the method of use of the enzyme, or the like.

[0162] As used herein, “instruction” is a document with an explanation of the method of use of the present disclosure for users. The instruction provides description for instructing the method of use of the present disclosure. If required, the instruction is prepared in accordance with a format specified by a regulatory authority of the country in which the present invention is practiced (e.g., Ministry of Health, Labour and Welfare, Ministry of Agriculture, Forestry and Fisheries, or the like in Japan, Food and Drug Administration (FDA) or Department of Agriculture (USDA) in the U.S., or the like), with an explicit description showing approval by the regulatory authority. An instruction can be provided in, but not limited to, paper media. An instruction can also be provided in a form such as electronic media (e.g., web sites provided on the Internet or emails).

### Preferred Embodiments

[0163] Preferred embodiments of the present disclosure are described below. Embodiments provided below are provided to facilitate the understanding of the present disclosure. It is understood that the scope of the present disclosure should not be limited to the following descriptions. Thus, it is apparent that those skilled in the art can make appropriate modifications within the scope of the present disclosure by referring to the descriptions herein. It is understood that the following embodiments of the present disclosure can be used alone or in combination.

[0164] (Adhesive Polypeptide Without A Self-Aggregation Property)

[0165] In one aspect, the present disclosure provides a novel fragment of an adhesive polypeptide or a variant thereof, which does not have a self-aggregation property and has an adhesive property, and a nucleic acid encoding the same.

[0166] In a representative aspect, the present disclosure provides a fragment of AtaA or a variant thereof, which does not have a self-aggregation property and has an adhesive property.

[0167] In a certain embodiment, the present disclosure typically provides a representative sequence of an adhesive polypeptide obtained from an Acinetobacter sp. To15 strain, or a variant thereof.

[0168] In one embodiment, the present disclosure provides a polypeptide comprising a fragment of the amino acid sequence set forth in SEQ ID NO: 1 or a variant thereof, wherein the polypeptide does not have a self-aggregation property and has an adhesive property.

[0169] In a specific embodiment, the adhesive polypeptide of the present disclosure comprises a sequence corresponding to amino acid positions 22 to 50 and 161 to 175 of the amino acid sequence set forth in SEQ ID NO: 1 or a variant sequence thereof, and one or more amino acid substitutions, additions, deletions, or combinations thereof in a range of a sequence corresponding to amino acid positions 2847 to 3093 of the amino acid sequence set forth in SEQ ID NO: 1. Preferably, the range of a sequence corresponding to amino acid positions 2847 to 3093 of the amino acid sequence set forth in SEQ ID NO: 1 is a range corresponding to amino acid positions 2855 to 3093 of the amino acid sequence set forth in SEQ ID NO: 1. More preferably, the adhesive polypeptide of the present disclosure has a deletion of the entire sequence corresponding to amino acid positions 2855 to 3093 of the amino acid sequence set forth in SEQ ID NO: 1. In a specific embodiment, the variable sequence comprises an alteration by a conservative substitution.

[0170] In a specific embodiment, the present disclosure provides a polypeptide, which is
[0171] (1) a polypeptide comprising, in a sequence corresponding to amino acid positions 1 to 3518 of the amino acid sequence set forth in SEQ ID NO: 1 or a variant sequence thereof or a fragment thereof,

[0172] at least one or more amino acid substitutions, additions, deletions, or combinations thereof in a sequence corresponding to amino acid positions 2855 to 3093 of SEQ ID NO: 1, and

[0173] a sequence having a sequence corresponding to amino acid positions 22 to 50 and 161 to 175 of SEQ ID NO: 1 or a variant sequence thereof,
[0174] (2) a polypeptide comprising, in a sequence corresponding to amino acid positions 1 to 3093 of the amino acid sequence set forth in SEQ ID NO: 1 or a variant sequence thereof or a fragment thereof,

[0175] at least one or more amino acid substitutions, additions, deletions, or combinations thereof in a sequence corresponding to amino acid positions 2855 to 3093, and

[0176] a sequence having a sequence corresponding to amino acid positions 22 to 50 and 161 to 175 or a variant sequence thereof,
[0177] (3) a polypeptide, which is a sequence corresponding to amino acid positions 1 to 2846 of the amino acid sequence set forth in SEQ ID NO: 1 or a variant sequence thereof or a fragment thereof, comprising

[0178] a sequence corresponding to amino acid positions 22 to 50 and 161 to 175 or a variant sequence thereof,
[0179] (4) a polypeptide comprising a part of amino acid positions 1 to 3518 of the amino acid sequence set forth in SEQ ID NO: 1 (wherein “a part” refers to a sequence with a deleted portion in a full length sequence, encompassing fragments as well as sequences with an intermediate portion knocked out),
   [0180] at least one or more amino acid substitutions, additions, deletions, or combinations thereof in a sequence corresponding to amino acid positions 2855 to 3093 of SEQ ID NO: 1, and

[0181] a sequence corresponding to amino acid positions 22 to 50 and 161 to 175 of SEQ ID NO: 1 or a variant sequence thereof,
[0182] (5) a polypeptide, which is a sequence corresponding to amino acid positions 1 to 2854 of the amino acid sequence set forth in SEQ ID NO: 1 or a variant sequence thereof or a fragment thereof, having

[0183] a sequence corresponding to amino acid positions 22 to 50 and 161 to 175 or a variant sequence thereof, (6) a polypeptide, which is a sequence corresponding to amino acid positions 1 to 268 of the amino acid sequence set forth in SEQ ID NO: 1 or a variant sequence thereof or a fragment thereof, having

[0184] a sequence corresponding to amino acid positions 22 to 50 and 161 to 175 or a variant sequence thereof, or (7) a polypeptide, which is a sequence corresponding to amino acid positions I to 257 of the amino acid sequence set forth in SEQ ID NO: 1 or a variant sequence thereof or a fragment thereof, having

[0185] a sequence corresponding to amino acid positions 22 to 50 and 161 to 175 or a variant sequence thereof.

[0186] In a specific embodiment, the present disclosure provides a polypeptide, which is
[0187] (a) a polypeptide, which is an amino acid sequence corresponding to amino acid positions 1 to 2854 of the amino acid sequence set forth in SEQ ID NO: 1 or a variant sequence thereof or a fragment thereof, having a sequence corresponding to amino acid positions 22 to 50 and 161 to 175 or a variant sequence thereof,
[0188] (b) a polypeptide, which is an amino acid sequence corresponding to amino acid positions 1 to 2846 of the amino acid sequence set forth in SEQ ID NO: 1 or a variant sequence thereof or a fragment thereof, having a sequence corresponding to amino acid positions 22 to 50 and 161 to 175 or a variant sequence thereof,
[0189] (c) a polypeptide, which is a sequence corresponding to amino acid positions 1 to 268 of the amino acid sequence set forth in SEQ ID NO: 1 or a variant sequence thereof or a fragment thereof, having a sequence corresponding to amino acid positions 22 to 50 and 161 to 175 or a variant sequence thereof, or
[0190] (d) a polypeptide, which is a sequence corresponding to amino acid positions 1 to 257 of the amino acid sequence set forth in SEQ ID NO: 1 or a variant sequence thereof or a fragment thereof, having a sequence corresponding to amino acid positions 22 to 50 and 161 to 175 or a variant sequence thereof.

[0191] In a specific embodiment, the present disclosure provides a polypeptide, which is
[0192] (1) a polypeptide, which is an amino acid sequence corresponding to amino acid positions 1 to 2854 of the amino acid sequence set forth in SEQ ID NO: 1 or a variant sequence thereof or a fragment thereof,
[0193] (2) a polypeptide, which is an amino acid sequence corresponding to amino acid positions 1 to 2846 of the amino acid sequence set forth in SEQ ID NO: 1 or a variant sequence thereof or a fragment thereof,
[0194] (3) a polypeptide, which is an amino acid sequence corresponding to amino acid positions 1 to 268 of the amino acid sequence set forth in SEQ ID NO: 1 or a variant sequence thereof or a fragment thereof, or
[0195] (4) a polypeptide, which is an amino acid sequence corresponding to amino acid positions 1 to 257 of the amino acid sequence set forth in SEQ ID NO: 1 or a variant sequence thereof or a fragment thereof.

[0196] In a specific embodiment, the adhesive polypeptide of the present disclosure is an amino acid sequence corresponding to amino acid positions 1 to 2854 or 2 to 2854 of the amino acid sequence set forth in SEQ ID NO: 1 or a variant sequence thereof or a fragment thereof. Preferably, the adhesive polypeptide of the present disclosure consists of an amino acid sequence corresponding to amino acid positions 1 to 2854 or 2 to 2854 of the amino acid sequence set forth in SEQ ID NO: 1.

[0197] In a specific embodiment, the adhesive polypeptide of the present disclosure is an amino acid sequence corresponding to amino acid positions 1 to 2846 or 2 to 2846 of the amino acid sequence set forth in SEQ ID NO: 1 or a variant sequence thereof or a fragment thereof. Preferably, the adhesive polypeptide of the present disclosure consists of an amino acid sequence corresponding to amino acid positions 1 to 2846 or 2 to 2846 of the amino acid sequence set forth in SEQ ID NO: 1.

[0198] In a specific embodiment, the adhesive polypeptide of the present disclosure is an amino acid sequence corresponding to amino acid positions 1 to 268 or 2 to 268 of the amino acid sequence set forth in SEQ ID NO: 1 or a variant sequence thereof or a fragment thereof. Preferably, the adhesive polypeptide of the present disclosure consists of an amino acid sequence corresponding to amino acid positions 1 to 268 or 2 to 268 of the amino acid sequence set forth in SEQ ID NO: 1.

[0199] In a specific embodiment, the adhesive polypeptide of the present disclosure is an amino acid sequence corresponding to amino acid positions 1 to 257 or 2 to 257 of the amino acid sequence set forth in SEQ ID NO: 1 or a variant sequence thereof or a fragment thereof. Preferably, the adhesive polypeptide of the present disclosure consists of an amino acid sequence corresponding to amino acid positions 1 to 257 or 2 to 257 of the amino acid sequence set forth in SEQ ID NO: 1.

[0200] In some embodiments, the adhesive polypeptide of the invention is derived from an Acinetobacter bacterium. In a specific embodiment, the Acinetobacter bacterium is of an Acinetobacter sp. To15 strain.

[0201] In some embodiments, the adhesive polypeptide of the present disclosure further comprises an amino acid sequence that is different from SEQ ID NO: I. In a specific embodiment, the different amino acid sequence is fused with the adhesive polypeptide of the present disclosure. In one embodiment, the different amino acid sequence is an amino acid sequence encoding a SNAP protein.

[0202] In a specific embodiment, the present disclosure provides a complex of the adhesive polypeptide of the present disclosure and a functionality-imparting entity.

[0203] In one embodiment, a complex of the polypeptide of the present disclosure or a functionality-imparting entity thereof can have an ability to cause adhesion and/or immobilization of a first subject to a second subject, an ability to not self-aggregate, or both.

[0204] In one embodiment, a complex of the polypeptide of the present disclosure or a functionality-imparting entity thereof has an ability to cause monolayer adhesion of the first subject.

[0205] In a specific embodiment, the first subject and the second subject are the same. In another embodiment, the first subject and the second subject are different.

[0206] In one embodiment, at least one of the first subject or the second subject is a functionality-imparting entity. Examples of the functionality-imparting entities include, but are not limited to, such entities having functions useful in biosensors, separation and labeling of biomolecules, regenerative medicine, production of bio, organic or inorganic hybrid materials, surface modification and functionalization, fermentation industry, pharmaceutical industry, chemical product industry, manufacture of biofuel, wastewater treatment, bioremediation, and the like. In a specific embodiment, functionality-imparting entities are proteins and/or peptides. In a more specific embodiment, functionality-imparting entities are streptavidin, neutral avidin, derivatives thereof, enzymes, antibodies, fluorescent molecules, receptors, functional peptides (antibacterial, fluorescent and signaling factors, inducing factors, etc.), nucleic acid aptamers, or serum components.

[0207] In one embodiment, a complex of the polypeptide, fusion polypeptide, or functionality-imparting entity thereof of the present disclosure is used for adhesion and/or immobilization of cells. Adhered and/or immobilized cells are any cells. Examples thereof include, but are not limited to, animal cells, vegetable cells, microorganism cells, and the like.

[0208] In one embodiment, the second subject is a support. In a specific embodiment, the support is a liposome.

[0209] In one embodiment, a complex of the polypeptide, fusion polypeptide, or functionality-imparting entity thereof of the present disclosure has an ability to cause adhesion of a polypeptide of an amino acid sequence that is different from AtaA contained in the polypeptide described above or a functionality-imparting entity contained in the complex described above, to a second subject.

[0210] (Production of Adhesive Polypeptides)

[0211] In one embodiment, the adhesive polypeptides and fusion polypeptides of the present disclosure are produced by expression systems using microorganisms.

[0212] The adhesive polypeptides, or fusion polypeptides thereof of the present disclosure, can be produced in E. coli as recombinant proteins in the manner commonly used in laboratories. That is, a gene encoding a fragment of AtaA or a fusion peptide obtained by fusing a peptide to the fragment is inserted at an appropriate position of an appropriate E. coli expression vector, such as the pET system, to transform E. coli, followed by adding an inducer to induce gene expression or to constitutively express under a constitutive expression promoter. The protein is often produced within the cytoplasm; however, the protein can also be secreted and produced in the periplasm. In the latter case, the gene sequence encoding the signal peptide originally possessed by the AtaA protein or the signal peptide integrated into the E. coli expression vector is coupled to the 5′end side encoding the protein so that the protein can be produced in the form of a signal peptide added to the amino-terminal side of the protein. Note that the signal peptide is cleaved and removed when the produced protein is secreted into the periplasm; thus, the resulting AtaA fragment or fusion protein thereof does not contain a signal peptide. The protein produced within cells is usually separated and purified from the solubilizing component, but may be obtained as an active protein by unwinding after its separation from the inclusion body. Note that the produced protein can be separated and purified by a commonly used affinity purification method using a His tag or Strep tag fused to the protein in advance. Furthermore, when a SNAP protein or the like is fused thereto, a molecule having a benzylguanyl (BG) group may be used for separation and purification. To further increase the degree of purification, ion exchange chromatography or gel filtration may be used in combination.

[0213] In the production method of adhesive polypeptides using this microorganism, detailed conditions, such as the method for expressing adhesive polypeptides, the host for expressing adhesive polypeptides and the method for purifying adhesive polypeptides secreted from the host, are to be appropriately adjusted by those skilled in the art. Furthermore, the adhesive polypeptides of the present disclosure can also be expressed using various expression systems such as, secretory production systems and cell-free expression systems, in addition to the intrabacterial expression systems of microorganisms.

[0214] The method for causing the above-mentioned microorganisms to produce the polypeptides of interest including the adhesive polypeptides of the present disclosure is merely exemplary, and those skilled in the art can prepare synthetic genes using a method commonly used in the art, while referring to the nucleic acid sequences (base sequences) or amino acid sequences of the genes of the present disclosure, thereby readily performing the design and construction of a DNA fragment to be inserted into the expression vector.

[0215] (Use of Polypeptide)

[0216] In one aspect, the adhesive polypeptide of the present disclosure is useful in a material engineering process. In another aspect, the adhesive polypeptide of the present disclosure is useful in an industry that uses a bioprocess. In a certain embodiment, the adhesive polypeptide of the present disclosure densely consolidates and immobilizes the proteins, peptides or cells, thus enabling material engineering processes such as surface modification and material design as well as bioprocesses in technical fields such as fermentation industry, pharmaceutical industry, chemical product industry, manufacture of biofuel, wastewater treatment, bioremediation, regenerative medicine, cell engineering, medical engineering, and biosensors, to be carried out efficiently.

[0217] In another aspect, the adhesive polypeptide of the present disclosure can be immobilized onto a liposome containing an enzyme or the like and utilized in a biosensor, environmental cleanup, or the like. When used especially in the environment, the adhesive polypeptides are advantageous in that they cannot grow unlike live cells so that there is hardly any risk of biohazard or ecological destruction from using a recombinant gene or protein.

[0218] (General Technology)

[0219] The molecular biological methodology, biochemical methodology, and microbiological methodology used herein are well known and commonly used in the art, which are described, for example, in Sambrook J. et al. (1989). Molecular Cloning: A Laboratory Manual, Cold Spring Harbor and its 4th Ed. (2012), Masato Okada, Kaori Miyazaki, 2011, “Protein Experiment Notes, Revised 4th Edition”, First and Second Volumes, Yodosha Co., Ltd., or the like. Relevant portions thereof (which may be the entire document) are incorporated herein by reference.

[0220] (Note)

[0221] As used herein, “or” is used when “at least one or more” of the listed matters in the sentence can be employed. When explicitly described herein as “within the range” of “two values”, the range also includes the two values themselves.

[0222] Reference literatures such as scientific literatures, patents, and patent applications cited herein are incorporated herein by reference to the same extent that the entirety of each document is specifically described.

[0223] As described above, the present disclosure has been described while showing preferred embodiments to facilitate understanding. The present disclosure is described hereinafter based on Examples. The above descriptions and the following Examples are not provided to limit the present disclosure, but for the sole purpose of exemplification. Thus, the scope of the present disclosure is not limited to the embodiments and Examples specifically described herein and is limited only by the scope of claims.

### EXAMPLES

[0224] The Examples are described hereinafter. When required, organisms used in the following Examples were handled in compliance with the guidelines stipulated by the Nagoya University, regulatory agency, or the Cartagena Protocol. For reagents, the specific products described in the Examples were used. However, the reagents can be substituted with an equivalent product from another manufacturer (Sigma-Aldrich, Fuji Film, Wako Pure Chemical, Nacalai Tesque, R & D Systems, USCN Life Science INC, Thermo Fisher Scientific, Kanto Chemical, Funakoshi, Tokyo Chemical industry, Merck, or the like).

### Example 1

### Search for Cell Surface Molecules Forming an Aggregate with AtaA in a Cell Aggregation

[0225] This Example shows cell aggregation analysis through microscope observation obtained by an experimental approach shown in the experimental model of FIG. 1A.

[0226] (Method)

[0227] An Acinetobacter sp. To15 strain that expresses mRFP (red fluorescent protein) and expresses a normal AtaA protein was homogenously admixed with an Acinetobacter sp. To15 strain that expresses EGFP (green fluorescent protein) and expresses a normal AtaA protein or a ΔAtaA strain. The formed cell aggregate was observed under a microscope. The resulting image was divided into small regions to calculate the ratio of cells that express EGFP.

[0228] (Results)

[0229] FIG. 1B shows an image of a cell aggregate formed by mixing an Acinetobacter sp. To15 strain that expresses EGFP with an Acinetobacter sp. To15 strain that expresses mRFP and a histogram of the ratio of cells that express EGFP in a small section. Both fluorescent protein expressing strains express a normal AtaA protein. FIG. 1C shows an image of a cell aggregate formed by mixing an Acinetobacter sp. To15 strain that expresses mRFP and a normal AtaA protein with a AAtaA strain that expresses EGFP and a histogram of the ratio of cells that express EGFP in a small section. In FIG. 1B, cells that express EGFP are homogenously present in a cell mass, and the histogram of the ratio of cells that express EGFP exhibited a peak in the middle. Meanwhile in FIG. 1C, cells that express EGFP were not taken into the cell mass, and a histogram of the ratio of cells that express EGFP exhibited a peak at an edge.

[0230] (Discussion)

[0231] It was demonstrated that cells that express AtaA did not form an aggregate with other cell surface molecules, but aggregated with cells that express AtaA. Specifically, it was demonstrated that cell-aggregation of cells of a To15 strain is due to an interaction between AtaA molecules.

### Example 2

### Search for a Self-Aggregation Domain

[0232] This Example searched for a domain associated with self-aggregation in an AtaA protein.

[0233] (Method)

[0234] (1) AtaA with a structure that is deficient of Nhead (SEQ ID NO: 7), (2), (3), and (4) AtaA with a structure that is deficient of a part of Nstalk (SEQ ID NOs: 9, 11, and 13, respectively), (5) AtaA with a structure that is deficient of Chead in addition to a part of Nstalk (SEQ ID NO: 15), and (6) AtaA with a structure that is deficient of the majority of Cstalk (while the FGG domain is preserved) (SEQ ID NO: 17) were designed (FIG. 2A). Construction of each partially deficient form involves cleaving, deleting, and re-attaching at a junction between domains in a manner that does not disrupt the structure based on domain annotation, or if it is unavoidable to cleave within a domain, domains were attached so that the domain and the amino acid sequence were preserved after deletion by utilizing a repeat sequence that is present in AtaA. Furthermore, if a repeat sequence cannot be used for being within a domain, the periodicity of a coiled coil was restored after cleaving, deleting, and re-attaching by utilizing the periodicity of coiled coil.

[0235] For each partially deficient form, an expression construct was constructed by utilizing pAtaA with a cloned ataA gene, pDONR221::ataA, or a synthetic gene fragment. A 4140 strain, which is an ataA gene deficient mutant strain of To15, was transformed by conjugating with a donor strain E. coli S17-1 possessing an expression construct (Simon, R.; Briefer, U.; Puhler, A., Bio-Technol 1983, 1, (9), 784-791) to obtain a transformed strain (domain deficient strain) expressing each partially deficient AtaA. A wild-type strain expressing a full length AtaA was transformed with an mRFP gene, and a domain deficient strain was transformed with an EGFP gene to prepare strains exhibiting red and green fluorescence, respectively. These transformed strains were used to evaluate the cell aggregation property by the same approach as the method described in Example 1.

[0236] (Results)

[0237] The results are shown in FIG. 2B. If an Acinetobacter sp. To15 strain that expresses a normal AtaA protein is mixed with (1) an Acinetobacter sp. To15 strain that expresses an AtaA protein with a structure that is deficient of Nhead, uptake of EGFP expressing domain deficient strain cells into a cell mass was not observed. Meanwhile, domain deficient strain cells expressing a partially deficient form other than (1) were homogenously present in a cell mass. A histogram of the ratio of cells expressing EGFP exhibited a peak at the center.

[0238] (Discussion)

[0239] (1) A To15 wild-type strain expressing a full length AtaA protein could not aggregate with only an Acinetobacter sp. To15 strain expressing an AtaA protein with a structure that is deficient of Nhead, but was able to aggregate with an Acinetobacter sp. To15 strain expressing an AtaA protein with a structure that is deficient of a site other than Nhead. Thus, it was demonstrated that Nhead of AtaA is essential for self-aggregation of microorganism cells, i.e., interaction between AtaAs. Specifically, it is suggested that self-aggregation among Nhead induces intermolecular interaction of AtaA.

### Example 3

### Design/Preparation of Nhead Recombinant Protein and Analysis of Folding

[0240] In this Example, a construct for inducing an Nhead domain of AtaA to be expressed as normally folded recombinant protein was designed.

[0241] (Method)

[0242] (Construction of Construct)

[0243] E. coli was induced to make Nhead, which is a functional site responsible for AtaA adhesion and self-aggregation, as a recombinant protein for the first time.

[0244] FIG. 3A shows a construct design of an Nhead recombinant protein (SEQ ID NO: 19). AtaA is correctly folded, and exerts its functions, by three polypeptide chains of the same type gathering to form a homotrimer. It is extremely challenging to design a construct of a recombinant protein. It is not easy, even for a protein engineering specialist, to design a trimer to properly form and correctly fold. It was inferred that the structure of Nhead is primarily comprised of a p strand from the primary structure (amino acid sequence). It was expected that formation of a trimer through association of a p strand would be difficult. It was understood that the neck, which is present on the C-terminus side of Nhead, also needed to be included in a construct. Furthermore, a GCN4pII tag, which is a coiled-coil structure known to promote trimer formation, was attached to Nhead. This was designed to maintain the periodicity of a coiled coil by attachment to a GCN4pII tag via a coiled coil, which is a part of an FGG domain at the N-terminus side tip of Nstalk for successful attachment to GCN4pII. Furthermore, a His tag was introduced to the C-terminus side of the GCN4pII tag to facilitate separation and purification. FIG. 3C shows the amino acid sequence of the Nhead recombinant protein thus designed (corresponding to the amino acid fragment at positions 59-325 of the AtaA sequence: the amino acid fragment at positions 2-268 of SEQ ID NO: 1). The origin of the sequence is also shown therein. To prepare this construct, a gene fragment encoding amino acid 1-268 positions of SEQ ID NO: 1 was inserted into the restriction enzyme Xbai/Bsai digestion fragment of the pIBA-GCN4tri-His vector, thus preparing pIBA Nhead recombinant DNA (pIBA-GCN4tri-His::ataA₅₉₋₃₂₅). The secondary structure was analyzed through a CD spectrum as an indicator to find whether a purified Nhead recombinant protein was properly folded.

[0245] (Purification of Nhead Recombinant Protein)

[0246] Cultures obtained by culturing BL21 star (DE3; pIBA-GCN4tri-His ataA₅₉₋₃₂₅) overnight were diluted 1: 100 in a LB medium and incubated at 37° C. for 3 hours. After the incubation, 0.2 μg/ml anhydrous tetracycline (AHTC) was added to the medium, followed by further incubation at 28° C. for 6 hours. The cells were harvested by centrifugation at 5,000×g for 15 minutes at 4° C. and resuspended in a lysis buffer (20 mM Tris-HCl, 150 mM NaCl and 20 mM imidazole, pH 9.0), followed by dissolving at 1,000 bar for 10 minutes using a high-pressure homogenizer (LAB 2000, SMT Co., Ltd.). After centrifugation at 10,000×g for 15 minutes at 4° C., the supernatant was loaded onto a Ni-NTA Superflow column (Qiagen NV) and washed twice with lysis buffer to remove unbound proteins. The bound protein was eluted with an elution buffer (20 mM Tris-HCl, 150 mM NaCl and 400 mM imidazole, pH 9.0). The eluted protein was loaded onto an anion exchange column (HiTrap Q HP, GE Healthcare) and the flow-through fraction containing the recombinant protein was dialyzed against 50 mM phosphate buffer (pH 6.0). The recombinant protein was then purified using a cation exchange column (HiTrap SP HP, GE Healthcare) in a phosphate buffer (pH 6.0) with a linear concentration gradient of 0 to 1,000 mM NaCl. The peak fraction containing the recombinant protein was concentrated by ultrafiltration using a centrifugal filter device (Amicon ultra, EMD Millipore), loaded onto a gel filtration column (HiLoad 26/60 Superdex 200 pg, GE Healthcare) equilibrated with 25 mM Tris-HCl (pH 9.0), and purified by gel filtration.

[0247] (Analysis of Folding of Purified Nhead Recombinant Protein)

[0248] The CD spectra of purified Nhead recombinant proteins were measured using J-725 spectropolarimeter (JASCO Corporation). Parameters were set to wavelengths of 190 to 250 nm, scan rate of 100 nm/min, scan interval of 0.1 nm, response of 0.25 seconds, and bandwidth of 1.0 nm.

[0249] (Results)

[0250] The result of analysis of CD spectra showed that a purified Nhead recombinant protein prepared by E. coli was not in a random coil state, but was forming a secondary structure, and was inferred as being folded (FIG. 3B). In this regard, the crystalline structure of Nhead was determined after crystallization. It was found as a result thereof that Nhead has two characteristic loops (first loop and second loop) that are not found in the head domain of other TAAs.

### Example 4

### Evaluation of a Function of a Loop on Nhead

[0251] This Example investigated whether first and second loops that are characteristic to Nhead are involved in nonspecific adhesion of AtaA.

[0252] (Method)

[0253] (Preparation of AtaA Mutant Strain)

[0254] Mutants with a deletion of each loop (SEQ ID NO: 21 and 23) were prepared through inverse PCR by utilizing a cloned ataA gene fragment, and were introduced and expressed in a 4140 strain (ΔataA), which is an ataA gene deficient mutant strain of To15. The loop deficient mutant strains, and wild-type strain (AtaA) for comparison, ΔataA, and Nhead deficient strain (INhead, SEQ ID NO: 7) were subjected to a microorganism adhesion test using a polystyrene (PS) plate and a glass plate.

[0255] (Method)

[0256] (Microorganism Adhesion Test)

[0257] Retrieved cells were washed three times with ultrapure water and suspended in a BS-N medium so that OD₆₆₀ would be 0.5. Cell suspensions (200 μL each) were placed in a well of a 96-well polystyrene (PS) or glass plate. After incubating for 2 hours at 28° C. without shaking, the cell suspensions were removed with a micropipette, and each well was rinsed three times with 120 μL of BS-N medium. Immobilized cells were stained for 15 minutes with 200 μL of 0.1% crystal violet solution. After rinsing three times with 200 μL of BS-N medium, a dye was eluted from cells using 200 μL of 70% ethanol, and absorbance at 590 nm of eluate (A590) was measured with a microplate reader. The composition of the BS-N medium is described in the article (S. Ishii, J. Koki, H. Unno, K. Hori; Two Morphological Types of Cell Appendages on a Strongly Adhesive Bacterium, Acinetobacter sp. Strain To15, Appl. Environ. Microbiol. 70, (2004) 5026-5029) and the article (H. Watanabe, Y. Tanji, H. Unno, K. Hori; Rapid Conversion of Toluene by an Acinetobacter sp. To15 Mutant Showing Monolayer Adsorption to Water-Oil interface, J. Biosci. Bioeng. 106 (2008) 226-230).

[0258] (Results)

[0259] FIG. 4 shows results of an adhesion test. The graph in FIG. 4 shows the results of measuring adhesion of microorganisms by A₅₉₀. Adhesion was significantly reduced for the first and second loop deficient strains. Accordingly, it was found that these two loops are essential for adhesion of AtaA.

### Example 5

### Evaluation of Self-Aggregation Property of Recombinant Nhead Expressed by E. coli

[0260] A sample that does not aggregate was able to be obtained upon purification of Nhead recombinant proteins. In this regard, this Example evaluated the self-aggregation property of recombinant Nhead expressed by E. coli through dynamic light scattering (DLS).

[0261] (Method)

[0262] A recombinant protein was dissolved in PBS buffer so that the concentration would be 0.2 mg/ml to prepare a sample solution. 40 μL of sample solution was placed in a quartz cell, and the particle shape was measured with a DLS analyzer equipped with a He-Ne laser (wavelength of 633 nm) (Zetasizer Nano ZSP, Malvern Instruments, UK). The measurement was taken under conditions with a temperature of 25° C., equilibrium time of 120 seconds, and scattering angle of 173°.

[0263] (Results and Discussion)

[0264] FIG. 5 shows the results. Recombinant Nhead expressed by E. coli quite unexpectedly did not exhibit a self-aggregation property. Therefore, it was revealed that recombinant Nhead expressed by E. coli exhibited a property that is different from Nhead on AtaA expressed in the Acinetobacter sp. To15 strain.

### Example 6

### Feature of Aggregate of Acinetobacter sp. To15 Strain

[0265] The inventor unexpectedly found that an AVL peptide has a function of interacting with first and second loops of Nhead to disintegrate an aggregate of Acinetobacter sp. To15 strain cells by AtaA. This Example observed disintegration of an aggregate of the Acinetobacter sp. To15 strain by said peptide under a microscope.

[0266] (Method)

[0267] An aggregate of the Acinetobacter sp. To15 strain and the Acinetobacter sp. To15 strain in the presence of an AVL peptide within a flow cell were observed under a microscope.

[0268] A flow cell prepared by the inventor in the manner described below was used.

[0269] (Preparation of Flow Cell)

[0270] The basic structure of the flow cell system constructed in the present disclosure is a silicone tube, for delivering a cell suspension or fluid, to which a glass tube is connected for observing cells. To construct a rectangular parallelepiped flow cell system, a silicone tube with a length of 300 mm, an inner diameter of 1 mm, and an outer diameter of 2 mm was connected to either end of rectangular parallelepiped glass with a length of 50 mm and each inner diameter of 1 mm (Vitrocom), where the connections were sealed with paraffin film. The silicone tube at the entrance was connected to a syringe pump (Legato 200, KD Scientific) via a three-way stopcock (Terumo Corporation), and the fluid was sent to the cell observation part (flow cell) of the rectangular parallelepiped glass tube.

[0271] A To15 cell suspension suspended in a BS-N medium was allowed to flow in the flow cell described above for 30 minutes at a rate of 64 μl/min to allow an aggregate of To15 cells to adhere to a glass flow cell. Subsequently, a BS-N medium comprising 0.1 mM of AVL peptide was allowed to flow at the same rate. The behavior of the adhered To15 cell aggregate was observed under a digital microscope (Keyence VHX-200).

[0272] (Results and Discussion)

[0273] FIG. 6 shows the results. Disintegration of an Acinetobacter sp. To15 strain cell aggregate by an AVL peptide was observed. An aggregate was not affected whatsoever even if a medium free of said peptide was allowed to flow at the same rate. It was found therefrom that an AVL peptide has a function of disrupting self-aggregation of Nheads of AtaA.

### Example 7

### Measurement of Adhesive Property of E. coli Recombinant Nhead

[0274] In this Example, adhesion of recombinant Nhead expressed by E. coli was measured through QCM-D.

[0275] (Method)

[0276] A recombinant Nhead protein (SEQ ID NO: 19) was dissolved in a PBS solution at a concentration of 50 μg/ml to prepare a sample solution. As a device, Q-Sense E4 (Biolin Scientific, Sweden) was used, and a polystyrene (PS) or silica sensor was used. First, a PBS buffer was allowed to flow at a flow rate of 250 μl /minute, and the inventor waited until the device stabilized. Subsequently, the sample solution was allowed to flow for 1.5 minutes at the same flow rate. The flow was stopped, the solution was left for 15 minutes and then the sample solution was allowed to flow again for 1.5 minutes at the same flow rate. The flow was again stopped and the solution was left for 10 minutes, and then rinsed by allowing PBS buffer to flow for 1 minute at the same flow rate. Furthermore, the flow was stopped and the solution was left for 5 minutes. Subsequently, 0.1 mM AVL peptide solution was allowed to flow for 2 minutes at the same flow rate, and the solution was left for 15 minutes after stopping the flow. Finally, PBS buffer was allowed to flow for 2 minutes at the same flow rate. The flow was stopped, and the buffer was left for 10 minutes to end the measurement.

[0277] (Results)

[0278] FIGS. 7A and 7B show the results. The Δf7/7 (Hz) value decreased to reach an equilibrium state immediately after adding Nhead no matter which of a polystyrene sensor or silica sensor was used. A change in the Δf7/7 (Hz) value was not observed even after the subsequent Nhead re-supplying step, rinsing step using a buffer, AVL peptide adding step, and second rinsing step using a buffer.

[0279] (Discussion)

[0280] It was understood that addition of E. coli recombinant Nhead resulted in immediate adhesion to a sensor to reach equilibrium. Since a change in the Δf7/7 (Hz) value was not observed thereafter even after re-supplying an E. coli recombinant Nhead solution, it was understood that Nhead did not further adhere. In view of the above, it is conjectured that E. coli recombinant Nhead has an ability to adhere to, but not accumulate, on a polystyrene or silica surface. This reflects that E. coli recombinant Nhead does not have a self-aggregation property. It is also understood that E. coli recombinant Nhead adhering to the surface does not peel off from simply rinsing with a buffer. Even when an AVL peptide that disrupts self-aggregation of native Nhead was subsequently supplied, separation was not observed. It can be understood in view of this fact that E. coli recombinant Nhead does not exhibit a self-aggregation property or adhere as a laminated layer. Separation due to re-rinsing was also not observed. In view of the above, it was found that E. coli recombinant Nhead does not laminate, but adheres in a single layer on a solid surface. It is understood that a small variation in signals from re-supplying Nhead, rinsing, supplying an AVL peptide, and re-rinsing is noise due to the operation.

### Example 8

### Self-Aggregation Property and Microorganism Immobilization Rate of Cells Expressing WChead

[0281] An unpredicted and perplexing result for the researcher conducting the study was obtained up to Example 7, where Nhead, when present at the tip of AtaA on a microorganism cell, exhibits adhesive and self-aggregation properties, but a recombinant Nhead protein produced by E. coli exhibited only an adhesive property, but not a self-aggregation property. From the application aspect, such an unexpected property of a recombinant Nhead protein results in a useful function, i.e., monolayer adhesion to the material surface. In this regard, the function of domains other than Nhead was studied in more detail in order to elucidate the reason thereof. It is a known fact that Chead, when present on AtaA on a microorganism cell, is not involved in adhesive or self-aggregation properties (K. Koiwai, M. D. Hartmann, D. Linke, A. N. Lupas and K. Hori; Structural basis for toughness and flexibility in the C-terminal passenger domain of an Acinetobacter trimeric autotransporter adhesin, J. Biol. Chem. 291 (2016) 3705-3724.) However, Chead is present at a base of an AtaA fiber. It was hypothesized that at this location, it is difficult for Chead to interact with the surface or other AtaA molecule, but Chead with a similar structure (Ylhead) at a tip of an AtaA fiber in the same manner as Nhead would also exert a function of adhesion or self-aggregation. In this regard, a WChead mutant strain with Nhead of AtaA substituted with Chead was prepared. This Example measured the self-aggregation property and immobilization rate of microorganism cells expressing WChead.

[0282] (Method)

[0283] A WChead variant was prepared to have a Chead-Nstalk-Chead-Cstalk domain group structure by deleting a full length AtaA protein Nhead domain and incorporating a Chead domain in said region (SEQ ID NO: 25). Cell adhesive properties of the WChead strain, and the wild type strain (AtaA), AAtaA strain, and ANhead strain were compared. Adhesive properties were tested by the same adhesion testing method as FIG. 4. For the self-aggregation test, a bacterial suspension was prepared by suspending microorganism cells in a BS-N medium so that the initial OD₆₆₀ would be 0.5. Self-aggregation properties were examined through tube-settling assay by using this suspension. Detailed procedures of this method are described in M. Ishikawa, K. Shigemori, A. Suzuki, and K. Hori; Evaluation of adhesiveness of Acinetobacter sp. To15 to abiotic surfaces, J. Biosci. Bioeng. 113 (2012) 719-725. However, the test tube was left for 3 hours.

[0284] (Results)

[0285] FIGS. 8A and 8B show the results. Since the self-aggregation property found in wild-type AtaA was lost in the ANhead deficient strain in FIG. 8A, this again demonstrated that Nhead is associated with self-aggregation properties. Furthermore, a self-aggregation property is found when WChead is expressed. Thus, it was demonstrated that Chead, when present at the AtaA fiber tip in the same manner as Nhead, also exerts a self-aggregation property. In FIG. 8B, microorganism adhesion found in the wild-type AtaA was reduced in the WChead expressing strain to the same extent as ;Nhead deficient strain. Thus, it was elucidated that Chead does not exhibit an adhesive property like Nhead, even when located at the tip of an AtaA fiber. Specifically, it was unexpectedly discovered that Chead does not have an adhesive property, but can exhibit an aggregation property depending on the location where it is present on an AtaA fiber, i.e., potentially has a self-aggregation function.

[0286] (Discussion)

[0287] The passenger domain of AtaA cleaved from a fiber is known to have adhesion and self-aggregation capabilities. Such a passenger domain comprises both Nhead and Chead. It is understood that Chead on an AtaA fiber, when the AtaA fiber is cleaved from a cell, is released from steric hindrance when present on a cell surface layer, so that a latent self-aggregation function is exerted. When an AtaA fiber is present on a cell surface layer, the orientation of proteins is aligned, so that a sufficient force to induce cell aggregation can be exerted with only Nhead at the tip. However, a passenger domain fiber of AtaA cleaved from a cell loses orientation, so that the contact efficiency between Nhead decreases compared to when it is on the cell. For this reason, a self-aggregation property cannot be exerted with only Nhead. However, if Chead is present, a domain with an aggregation property would be close to both ends of a fiber, so that a self-aggregation property would be exhibited. Specifically, it is understood that an AtaA fragment cleaved from a microorganism cell exhibits a self-aggregation property when having both Nhead and Chead, but would not exhibit a self-aggregation property when only Nhead is present without Chead. Accordingly, when an AtaA fragment that does not comprise Chead or an AtaA fragment having Chead introduced with a mutation to eliminate the self-aggregation function of Chead comprises Nhead, a recombinant protein having an adhesion function, but without a self-aggregation function is produced.

### Example 9

### Immobilization of a Fusion Product with an Nhead Fusion Peptide

[0288] An Example of immobilizing a functional protein on a material surface by utilizing a monolayer adhesion of Nhead is provided. For this purpose, a fusion peptide prepared by fusing a SNAP protein to Nhead (SEQ ID NO: 27) was designed as a model protein. FIG. 9A shows the construct design. The design involves fusing a SNAP protein between a GCN4pII tag and a His tag of the Nhead recombinant protein shown in FIG. 3. FIG. 9C shows the sequence of this Nhead-SNAP fusion peptide. The secondary structure was analyzed through CD spectra as an indicator for finding whether a purified Nhead-SNAP fusion peptide is correctly folded.

[0289] (Method)

[0290] A DNA construct was prepared by attaching a fragment amplified by inverse PCR from pIBA-GCN4tri-His::ataA₅₉₋₃₂₅ to a separately prepared DNA (SNAP-DNA) fragment encoding SNAP protein by In-Fusion cloning. This was introduced into and produced by E. coli, and the fusion peptide was purified. The specific procedure is the same as that described in Example 3.

[0291] (Results)

[0292] The results of CD spectrum analysis show that a purified Nhead-SNAP fusion peptide produced by E. coli is not in a random coil state, but forms a secondary structure (FIG. 9B).

### Example 10

### Immobilization of Nhead-SNAP Fusion peptides onto various material surfaces)

[0293] This Example attempted to immobilize an Nhead-SNAP fusion peptide onto each of glass, polystyrene (PS), titanium (Ti), and polytetrafluoroethylene resin (PTFE) surfaces.

[0294] (Method)

[0295] FIG. 10A shows the procedure of immobilization of the fusion peptide onto a surface. Holes with a 5 mm diameter were opened at a 1.5 cm interval on 4 lavers of polyvinyl chloride tape (VT-196; Nichiban) applied onto a Teflon® tape (Nitto Tape No. 303; Nitto Denko) with a hole punch. The Teflon tape was peeled off and applied to the target material before use to prepare a polyvinyl chloride test well with a depth of 0.8 mm on a flat material. 1 μM of Nhead-SNAP fusion peptide solution was added dropwise to the well and left for 1 hour. A sample without adding anything (Blank) and a sample added with only a SNAP protein were also prepared as negative controls. To quantify the fusion peptide immobilized on the surface, μM of SNAP-Surface 488, which is a fluorescent substrate molecule of a SNAP protein that is a product fused to Nhead, was added dropwise and left for 1 hour at 37° C. to covalently bind a fluorescent substrate to a SNAP protein via a benzylguanyl group. After washing 5 times with PBS, the sample was exposed to light for 120 seconds while irradiating green LED light comprising a 506 nm excitation wavelength to capture 526 nm fluorescence with a fluorescence scanner.

[0296] (Results)

[0297] FIG. 10B shows the results. Generation of fluorescence was observed in all substrates to which an Nhead-SNAP fusion peptide was added. Thus, it was elucidated that Nhead-SNAP fusion peptides can adhere to, and be immobilized on, all materials used in the experiment via Nhead. It is also demonstrated that a SNAP protein alone cannot be immobilized onto a substrate.

### Example 11

### Immobilization of an Antimicrobial Peptide with an Nhead-SNAP Fusion Peptide

[0298] This Example attempted to impart antimicrobial activity to a material surface by immobilizing an antimicrobial peptide with an Nhead-SNAP fusion peptide.

[0299] (Method)

[0300] 15 ul of 3 μM Nhead-SNAP fusion peptide solution was added to a 12-well highly water-repellant printed microscope slide (Matsunami Glass) and left for 1 hour at room temperature. The solution was washed three times with pl of PBS, combined with 9 μM benzylguanylated (BG) CAP18 antimicrobial peptide, and incubated for 1 hour at 37° C. to covalently bind the antimicrobial peptide to the SNAP protein portion of the fusion peptide. The fusion product was then washed three times with 20 μl of PBS. 15 μl of M9 medium (OD600 =0.01) in which Pseudomonas aeruginosa PA01 was suspended was added, and the mixture was left for 15 minutes at room temperature. After removing the microorganism suspension, this was washed three times with 20 μl of M9 medium. 15 μl of M9 medium was then added, and the mixture was left and was cultured for 10 hours at 37° C. After culture, the culture was washed three times with PBS. Microorganism cells were fluorescently stained for 15 minutes using SYTO9 with a final concentration of 3.34 μM. Finally, the cells were washed 5 times with PBS, and a biofilm formed on the microscope slide was observed under a confocal laser microscope.

[0301] (Results)

[0302] FIG. 11 shows the results. A BG-lated antimicrobial peptide was immobilized to suppress the formation of a biofilm of Pseudomonas aeruginosa only on an Nhead-SNAP-coated polystyrene surface when the peptide was added. However, formation of a biofilm of Pseudomonas aeruginosa could not be suppressed on a surface coated with only a SNAP protein or on an untreated surface, even after adding a BG-lated antimicrobial peptide. It was confirmed that a SNAP protein itself does not have an ability to adhere to a surface, and an antimicrobial peptide itself does not exhibit an ability to adsorb onto a surface. Accordingly, immobilization of a SNAP protein onto a surface using Nhead as an adhesion tag and attachment of a BG-lated functional molecule to SNAP enabled preparation of functional surfaces such as an antimicrobial surface.

### Example 12

### Preparation of SNAP-Nhead-GCN4pII Fusion Peptide having a SNAP Protein on the N-Terminus Side

[0303] The objective of this Example is to prepare an Nhead having a SNAP protein on the N-terminus side (SEQ ID NO: 29) and to reveal whether this would fold in a normal manner.

[0304] (Method)

[0305] A DNA fusing (1) a base sequence upstream of an ataA gene (GA ATT CAT CTC CTA AGG AAA AGC GAT (SEQ ID NO: 5): underlined is the restriction enzyme EcoRI recognition sequence), (2) an AtaA signal peptide recognition sequence (amino acid positions 1 to 59 of SEQ ID NO: 4)-SNAP protein-glycine linker encoding base sequence, and (3) a base sequence encoding the Nhead tip (positions 7 to 35 of the base sequence of SEQ ID NO: 2) (to the restriction enzyme XmnI cleavage site) was prepared through overlap PCR by utilizing pDONR::ataA with a cloned ataA gene, and a SNAP-DNA fragment. This was attached to pDONR::ataA EcoRI or XmnI digested fragment to construct a fusion gene fragment encoding a polypeptide with a SNAP protein and a glycine linker inserted between AtaA's signal peptide recognition sequence and Nhead (or to be exact, this without the first alanine residue). This was used as a template to amplify a DNA fragment encoding Nhead and coiled coil portion (amino acid positions 3 to 268 of SEQ ID NO: 1) of SNAP protein-glycine linker-AtaA by PCR. This was inserted into a pIBA-GCN4tri-His in the same manner as Example 3 to prepare a pIBA::SNAP-Nhead fusion peptide (pIBA::SANP-AtaA₆₀₋₃₂₅). This was introduced into E. coli and produced as a recombinant protein. Production and purification of a SNAP-Nhead fusion peptide, and whether the purified fusion peptide is correctly folded, were checked in accordance with the Example 3.

[0306] (Results)

[0307] FIG. 12 shows the results. As a result of CD spectrum analysis, a purified SNAP-Nhead fusion peptide produced by E. coli is shown to be not in a random coil state, but was forming a secondary structure, and is inferred to be folded.

### Example 13

### Evaluation of the Ability to Immobilize and Function of a SNAP-Nhead Fusion Peptide

[0308] This Example evaluated the immobilization function of an antimicrobial peptide by the SNAP-Nhead fusion peptide prepared in Example 12.

[0309] (Method)

[0310] First, BG-lated antimicrobial peptide CAP18 was reacted with a fusion peptide immobilized on a surface and covalently attached to a SNAP protein within the fusion peptide. Next, a fluorescent substrate of the SNAP protein was reacted to the immobilized fusion peptide to covalently attach the fluorescent substrate to the SNAP protein, which was open because an antimicrobial peptide could not attach thereto. The efficiency of attachment to a fusion peptide of CAP18 can be found by comparing the fluorescence intensity with fluorescence intensity from when a fluorescent substrate is reacted without reacting with CAP18 in advance. For this reason, 100 μl of fusion peptide solution (1 μM) was applied to a 96-well black polystyrene plate and left for 1 hour at room temperature to immobilize the fusion peptide onto the plate. After washing three times with 110 μl of PBS, the sample was reacted by adding 100 μl of 3 μM BG-lated CAP18 antimicrobial peptide solution and incubating for 1 hour at 37° C. After washing three times with 110 pl of PBS, 100 μl of 3 μM SNAP surface 488 was applied and reacted for 1 hour at 37° C. Finally, this was washed 5 times with 110 μl of PBS, and 485 nm exciting light was irradiated to measure the fluorescence intensity of a 535 nm wavelength with a plate reader. Meanwhile, fluorescence intensity from applying SNAP Surface 488 without the reaction step with CAP18 was also measured by the same method. This test was conducted on an Nhead-SNAP fusion peptide and the original SNAP protein as a control in addition to the SNAP-Nhead fusion peptide.

[0311] (Results)

[0312] FIG. 13 shows the results. A SNAP-Nhead fusion peptide resulted in a similar decrease in the fluorescence value as an Nhead-SNAP fusion peptide. Thus, it was concluded that a SNAP-Nhead fusion peptide has the same ability to immobilize a peptide as an Nhead-SNAP fusion peptide.

[0313] (Discussion)

[0314] It was shown that when an Nhead recombinant protein is used as an adhesion tag, a peptide to be immobilized can be fused on either the carboxy terminus side or the amino terminus side of Nhead.

### Example 14

### Preparation of an Nhead-SNAP Fusion Peptide without a GCN4pII Tag

[0315] The objective of this Example is to elucidate whether a GCN4pII tag fused with the expectation of assisting in trimerization of an AtaA fragment is essential, or not required, for folding of an E. coli recombinant Nhead protein.

[0316] (Method)

[0317] FIG. 14A shows the construct design (SEQ ID NO: 31) of a fusion peptide prepared in this Example. A DNA construct of interest was constructed by deleting a region encoding a GCN4pII tag through inverse PCR by utilizing a DNA construct constructed for preparing the Nhead-SNAP fusion peptide shown in Example 9. FIG. 14C shows the amino acid sequence of the construct Nhead-SNAP_ΔGCN4pII fusion peptide. The fusion peptide was purified in accordance with the method of purifying an Nhead recombinant protein described in Example 3. The CD spectra of the purified fusion peptide were measured by the same approach as Example 3.

[0318] (Results)

[0319] The results of CD spectrum analysis show that a purified Nhead-SNAP_ΔGCN4pII fusion peptide produced by E. coli was not in a random coil state, but was forming a secondary structure, and was folded (FIG. 14B).

[0320] (Discussion)

[0321] It is understood from the above results that a trimerized tag, i.e., GCN4pII tag, is not essential for the design and preparation of an E. coli recombinant Nhead protein and a fusion peptide thereof.

### Example 15

### Preparation of an Nhead-SNAP Fusion Peptide without a Coiled Coil Region

[0322] The objective of this Example is to elucidate whether an E. coli recombinant protein can be prepared, or a prepared construct can be folded from having activity, with only the Nhead domain region (Nhead-neck) by removing a coiled coil region from the Nhead-SNAP fusion peptide shown in Example 9.

[0323] (Method)

[0324] FIG. 15A shows the construct design (SEQ ID NO: 33) of the fusion peptide prepared in this Example. A DNA construct of interest was constructed by deleting a region encoding a coiled coil through inverse PCR by utilizing a DNA construct constructed for preparing the Nhead-SNAP fusion peptide shown in Example 9. FIG. 15C shows the amino acid sequence of the construct Nhead-SNAP_ΔCC fusion peptide. The fusion peptide was purified in accordance with the method of purifying an Nhead recombinant protein described in Example 3. The CD spectra of the purified fusion peptide were measured by the same approach as Example 3.

[0325] (Results)

[0326] The results of CD spectrum analysis show that a purified Nhead-SNAP_ΔCC fusion peptide produced by E. coli was not in a random coil state, but was forming a secondary structure, and was folded (FIG. 15B).

[0327] (Discussion)

[0328] It is understood from the above results that a coiled coil portion is not required for the design and preparation of an E. coli recombinant Nhead protein and a fusion peptide thereof.

### Example 16

### Evaluation of Function of Various Fusion Peptides of Nhead and SNAP Protein

[0329] This Example evaluated the ability to immobilize for various fusion peptides of Nhead and SNAP protein prepared in Examples 14 and 15. The amount of immobilization of a fusion peptide was evaluated using a fluorescence substrate of a SNAP protein.

[0330] (Method)

[0331] SNAP Surface 488 was attached to a fusion peptide immobilized onto a 96-well black polystyrene plate by the method in accordance with Example 13, and immobilization was quantified by measurement with a plate reader. However, unlike Example 13, the peptide was not attached to CAP18 in advance.

[0332] (Results)

[0333] It was elucidated that an Nhead-SNAP_ΔGCN4pII fusion peptide and an Nhead-SNAP ICC both have an immobilization capability that is equivalent to or greater than an Nhead-SNAP fusion peptide.

[0334] (Discussion)

[0335] It was revealed that when a functional peptide is fused, there is no need to utilize a GCN4pII tag or need to keep a coiled coil region of AtaA. Even without them, Nhead and a fusion peptide of Nhead are correctly folded and exert a function.

### Example 17

### Application Example of E. Coli Recombinant Nhead as a Surface Adhesion Protein

[0336] This Example shows that E. coli recombinant Nhead and streptavidin bind to form a complex.

[0337] (Method)

[0338] In accordance with Example 5, the particle shape of E. coli recombinant Nhead alone, streptavidin (SA) alone, and a protein in a mixture of Nhead and SA was measured by DLS. For a solution of an individual protein, the concentration of sample solution was adjusted to 0.2 mg/ml in the same manner as Example 5. When two types of proteins were mixed, equal amounts of each sample solution adjusted to 0.2 mg/ml were mixed and left for 5 minutes. 40 μl of the mixture was then used for measurement.

[0339] (Results)

[0340] FIG. 17 shows the results. A peak of a single molecule is manifested at 5 to 10 s of nm for both E. coli recombinant Nhead alone and SA alone. When these are mixed, the peak shifts to 1000 s of nm. This is much larger than the simple sum of single molecules of E. coli recombinant Nhead and SA. This shows that large number of both protein molecules aggregated while forming a complex.

### Example 18

### Attachment of E. Coli Recombinant Nhead and Neutral Avidin

[0341] This Example shows that E. coli recombinant Nhead attaches to neutral avidin to form a complex.

[0342] (Method)

[0343] This Example was conducted using the same method as Example 17. However, SA in Example 17 was substituted with neutral avidin in this Example.

[0344] (Results)

[0345] FIG. 18 shows the results. A peak of a single molecule is manifested at 5 to 10 s of nm for both E. coli recombinant Nhead alone and neutral avidin alone. When these are mixed, the peak shifts to 1000 s of nm. This is much larger than the simple sum of single molecules of E. coli recombinant Nhead and neutral avidin. This shows that large number of both protein molecules aggregated while forming a complex.

### Comparative Example 1

### Interaction Between E. Coli Recombinant Nhead and Avidin

[0346] This Example shows that E. coli recombinant Nhead does not attach to avidin.

[0347] (Method)

[0348] This Example was conducted using the same method as Example 17. However, SA in Example 17 was substituted with avidin in this Example.

[0349] (Results)

[0350] FIG. 19 shows the results. A peak of a single molecule is manifested at 5 to 10 s of nm for E. coli recombinant Nhead alone, avidin alone, and mixture of both proteins. This revealed that E. coli recombinant Nhead cannot attach to avidin and thus a complex is not formed.

[0351] (Discussion)

[0352] It is shown that a function of forming a complex of E. coli Nhead with another protein is an interaction that specifically selects a binding partner.

### Example 19

### Immobilization of Cells

[0353] This Example shows that two types of microbial cells can be immobilized on a plate coated with E. coli recombinant Nhead on the surface.

[0354] (Method)

[0355] FIG. 20A shows the schematics of the method. A plate was coated with E. coli recombinant Nhead. Bacillus subtilis or Escherichia coli adjusted to a certain concentration was added dropwise onto the plate and incubated for 6 hours. The plate was then washed with pure water (DW), and each cell was stained with a nuclear staining agent. Cells immobilized on the plate were observed under a confocal microscope.

[0356] (Results)

[0357] FIG. 20B shows the results. Immobilization of cells onto the plate to which one of Bacillus subtilis and Escherichia coli was added dropwise was observed. Immobilization of cells was not observed on a plate that was not coated with Nhead or a plate to which BSA was added dropwise instead of Nhead.

### Example 20

### Preparation and Investigation of Liposome Prepared by Immobilizing an Nhead-SNAP Fusion Peptide on the Surface Layer (Nhead Surface Layer Modififed Liposome)

[0358] (Method)

[0359] (Preparation of an Nhead Surface Layer Modified Liposome)

[0360] This liposome was prepared by reacting the Nhead-SNAP fusion peptide shown in Example 9 with a benzylguanyl (BG)-lated liposome. The BG-lated liposome was prepared as follows.

[0361] The inside of a round-bottom flask containing 300 μl of 50 mg/ml egg yolk phosphatidylcholine (COATSOME NC-50 (EPC), Yuka Sangyo) dissolved in chloroform was rotated while evacuating for 1 hour. A lipid film was hydrated with buffer A (10 mM HEPES, pH 7.6, 50 mM, potassium glutamate) or buffer B (10 mM Tris-HCl (pH 9.0)) supplemented with 25 gM of Alexa Fluor 647 to obtain 300 gL of 50 mg/ml lipid solution. Samples with GUS were used by adding 2 μM of GUS to buffer A. 1 mg/mL BSA was added to buffer B for samples subjected to observation under an electron microscope. These lipid solutions were sonicated for 10 minutes and vortexed for 10 seconds. The lipid solutions were further subjected to 5 freeze-thaw cycles. Next, a liposome suspension was extruded out with a mini extruder (Avanti Polar Lipids, Alabaster, Ala., USA) by using a 0.8 μm VCTP Isopore membrane filter at room temperature. 1200 μL of buffer A or buffer B was added to 300 μL of giant unilamellar vesicle (LUV) prepared using buffer A or B, respectively. The solution was centrifuged for 30 minutes at 20,000×g and washed by replacing the supernatant with 1200 μL of buffer A or B. The washing step was repeated 4 times.

[0362] A BG liposome was prepared as follows. Specifically, 14 μl of 2 mM BG-DSPE (PEG200) dissolved in chloroform was rotated for 15 minutes while evacuating in a glass micro-test tube and hydrated with buffer A or B. The BG-DSPE solution was then added to the LUV solution so that the final concentration would be 93 μM, incubated for 20 hours at room temperature, and washed 4 times as described above.

[0363] A liposome (LUV) solution and Nhead-SNAP fusion peptide solution (10 μM) were mixed within a 1.5 mL low adsorption tube (MS-4215M; Sumitomo Bakelite). A BG-lated LUV liposome was reacted with the fusion peptide by incubation for 30 minutes at 37° C. to obtain an Nhead modified liposome. The liposome was centrifuged at 8000×g at 4° C. for 5 minutes. The supernatant was removed. Pellets of the liposome were resuspended in 50 μl of 10 mM Tris-HCl (pH 9.0) to obtain an Nhead surface layer modified liposome solution.

[0364] (Method)

[0365] (Investigation of an Nhead Surface Layer Modified Liposome)

[0366] The particle shapes of modified liposome and Nhead surface layer modified liposome were measured by DLS to investigate whether the modified liposomes were properly prepared. The DLS measurement method was the same method shown in Example 5.

[0367] (Results and Discussion)

[0368] FIG. 21 shows the results. The diameter peak was found at a particle size of about 90 nm for E. coli recombinant Nhead surface layer modified liposomes, whereas the diameter peak was found at a particle size of about 60 nm for normal liposomes without surface layer modification.

[0369] It was found from this result that immobilization of E. coli recombinant Nhead-SNAP onto a liposome surface layer results in an increase in the liposome diameter due to surface layer modification, but not in aggregation of liposomes to result in monodispersion. This is because E. coli recombinant Nhead and a SNAP protein fusion peptide thereof do not have an aggregation property.

### Example 21

### Analysis of an Adhesive Property of an Nhead Surface Layer Modified Liposome

[0370] (Method)

[0371] 45 μl of liposome suspension (concentration of Nhead-SNAP fusion peptide: equivalent to 1 μM or 10 μM) was added dropwise to a 96-well polystyrene plate (Becton, Dickinson and Company) and mixed with 5 μl of 10× phosphate buffered saline (1.37 M NaCl, 27 mM KCl, 81 mM Na₂HPO₄.7H₂O, 14.7 mM KH₂PO₄). The plate containing the liposome suspension was centrifuged at room temperature for 30 minutes at 700 g to allow adhesion of liposome particles onto the surface of the plate. To remove unattached liposomes, a well was washed 2 to 4 times with a buffer (9.0 mM Tris-HCl (pH 9.0), 137 mM NaCl, 2.7 mM KCl, 8.1 mM Na₂HPO₄.7H₂O, 1.47 mM KH₂PO₄), and then 50 μl of 10 mM Tris-HCl buffer (pH 9.0) was added to the well. Adhesion of liposome was evaluated by measuring fluorescent signals of AF647 encapsulated within the liposome by using a microplate reader (ARVO X3; PerkinElmer). Fluorescent signals were quantified in top reading mode to improve the signal-to-noise ratio. When detecting fluorescence from adhering liposomes, the bottom surface was masked with a black plastic tape.

[0372] (Results and Discussion)

[0373] FIG. 22 shows the results. Nhead concentration dependent adhesion of BG-lated liposomes mixed with Nhead-SNAP to a polystyrene plate was observed. However, a liposome that is not BG-lated prepared as a comparative example was not modified with Nhead on the surface layer, so that adhesion thereof to the plate was not observed.

### Example 22

### Preparation and Investigation of a Liposome Prepared by Immobilizing an Nhead Nstalk (NhNs)-SNAP Fusion Peptide Onto the Surface Layer (Nhead Nstalk Fiber Surface Layer Modified Liposome)

[0374] This Example prepared and investigated a liposome prepared by immobilizing an Nhead Nstalk (NhNs)-SNAP fusion peptide onto the surface layer.

[0375] (Method)

[0376] (Preparation of an NhNs-SNAP Fusion Peptide)

[0377] A DNA construct of pIBA-GCN4tri-street-tag::NhNs-SNAP was prepared by utilizing the Nhead-SNAP fusion peptide shown in Example 9 and pDONR::ataA. An E. coli BL21 (DE3) strain was transformed therewith. The resulting recombinant E. coli was cultured in an LB medium comprising 100 μg/ml ampicillin at 37° C. until OD₆₀ would be 0.5 to 0.7. After adding 0.2 μg/ml anhydrotetracycline, the recombinant E. coli was further cultured for 16 hours at 18° C. to produce an NhNs-SNAP fusion peptide (SEQ ID NO: 35). FIG. 23 shows a schematic diagram of the fusion peptide. The top row shows the full length of an AtaA protein, and the bottom row shows an NhNs-SNAP fusion peptide. An NhNs fiber surface layer modified liposome was prepared as described below by using BG-lated LUV and a cell lysate of recombinant E. coli that produced the fusion peptide therein.

[0378] (Preparation of a Liposome Prepared by Immobilizing an NhNs-SNAP Fusion Peptide on the Surface Layer)

[0379] A BG-lated liposome suspension was mixed with 2.0 mg/mL of cell extract of E. coli BL21 (DE3) transformant that has produced an NhNs-SNAP fusion peptide. By using a rotor, the mixture was incubated for 1 hour at 4° C. and then centrifuged for 10 minutes at 15,000 g to allow NhNs fiber surface layer modified liposome particles to precipitate. The precipitated liposome particles were washed twice with 10 mM Tris-HCl (pH 9.0) buffer and resuspended in the same buffer.

[0380] (Observation of the Prepared NhNs Fiber Surface Layer Modified Liposome)

[0381] The resulting NhNs fiber surface layer modified liposome was observed under an electron microscope to examine the modification of the liposome. A suspension of the liposome was diluted 50-fold in 10 mM Tris-HCl buffer (pH 9.0). The liposome was allowed to adsorb to a carbon coated copper film (400 mesh) and stained for 10 seconds with a 2% phosphotungstic acid solution (pH 7.0). A grid was then vacuum dried for 10 minutes. The grid was observed at 100 kV of acceleration voltage by using a transmission electron microscope (JEM-1400 plus, JEOL). A digital image (3296×2472 pixels) was captured with a CCD camera (EM-14830RUBY2, JEOL).

[0382] (Results)

[0383] FIG. 24 shows the results. The state in which an Nhead Nstalk fiber is immobilized on the surface of a liposome, and the surface layer of the liposome is modified with the fusion peptide was observed under an electron microscope.

### Example 23

### Evaluation of Dispersion/Aggregation of Nhead Nstalk Fiber Modified Liposomes)

[0384] (Method)

[0385] Dispersion/aggregation was measured by the same procedure as Examples 5 and 17 by DLS. However, measurement was also taken for an Acinetobacter sp. To15 strain and ΔataA mutant strain for comparison. A bacterial cell culture was retrieved by centrifugation at 8,000 g, washed 5 times with pure water, adjusted with pure water to OD₆₆₀=0.05, and measured.

[0386] (Results and Discussion)

[0387] FIG. 25 shows the results of Example 23. It was elucidated in view of the results of FIG. 25A that the distribution of sizes of bacterial cells differs in the presence of AtaA from the absence thereof. The majority of sizes for the Acinetobacter sp. To15 strain was about 1720 nm, which was greater by about 440 nm compared to about 1280 nm for ΔataA. This corresponds to the size of native AtaA (225 nm x 2). As shown in FIG. 25B, it can be understood that aggregates precipitated in 100 mM KCl solution, so that the solution was transparent, while cells were suspended without self-aggregation in pure water, so that the solution was opaque. Specifically, To15 cells with native AtaA do not self-aggregate in pure water. Thus, the small peak found near 5500 nm seen in To15 of FIG. 25A does not indicate an aggregate of To15 strain. It is inferred in view of the diameter that this is a small cell population of about 10 cells that are weakly entangled.

[0388] In view of the results in FIG. 25C, the diameter of an NhNs fiber surface layer modified liposome was about 1280 nm, which is greater than the diameter of about 825 nm of an unmodified liposome by 455 nm. This is about 2-fold of the length 180 nm of Nhead Nstalk. It was also elucidated that an NhNs fiber surface layer modified liposome does not exhibit a self-aggregation property. It is understood that the peak similarly seen as To15 of FIG. 25A near 5000 nm is also not an aggregate of NhNs fiber surface layer modified liposomes.

### Example 24

### Adhesion Assay for Nhead Nstalk Fiber Modified Liposomes and Enzymatic Reaction Using an Adhesive Liposome

[0389] This Example shows adhesion of an NhNs fiber surface layer modified liposome and an enzymatic reaction using an immobilized liposome.

[0390] (Method)

[0391] (Adhesion Assay)

[0392] The assay was conducted by the same method as Example 20. However, adhesion to a 96-well glass bottom plate (Matsunami Glass) in addition to a polystyrene plate was evaluated.

[0393] (Enzymatic Reaction)

[0394] 2 μM β glucuronidase (GUS) was encapsulated upon liposome preparation for an enzymatic reaction. A liposome was immobilized on a plate to measure enzymatic activity by the following method.

[0395] For an enzymatic assay using GUS encapsulated into a liposome adhering on the plate surface, a liposome suspension was diluted 50-fold with 10 mM Tris-HCl buffer (pH 9.0), and 50 μL of the suspension was placed on a polystyrene well plate. Liposomes were allowed to adhere on the plate surface by centrifugation. After washing and removing unimmobililzed liposomes, 50 μL of 10 mM Tris-HCl buffer comprising 10 μM TokyoGreen-8 GicU (Goryo Chemical) as a substrate of GUS was added to each well. A hydrolytic reaction was detected as a fluorescent signal at the indicated timing by using a microplate reader. The excitation wavelength and fluorescence wavelength were 485 nm and 535 nm, respectively.

[0396] (Results)

[0397] FIG. 26 shows the results of Example 24. Significant fluorescence was measured when an NhNs fiber surface layer modified liposome was obtained by mixing a BG-lated liposome with a cell lysate in both FIG. 26A (polystyrene plate) and FIG. 26B (glass plate). The fluorescence increased with an increase in the protein concentration of the cell lysate. In contrast, fluorescence was not observed for a control unmodified liposome without a PG group modification (Egg PC liposome).

[0398] FIG. 26C shows the results of measuring enzymatic activity. Significant fluorescence indicating an enzymatic reaction was observed in a well where an NhNs fiber surface layer modified liposome was immobilized.

[0399] (Discussion)

[0400] It is demonstrated that modification of a liposome surface layer with Nhead Nstalk enables immobilization of a liposome on various material surfaces, and a chemical reaction can be performed with an enzyme encapsulated in the immobilized liposome.

### Example 25

### Analysis of Sself-Aggregation and Adhesive Properties Using a Modified AtaA Polypeptide

[0401] This Example compares self-aggregation and adhesive properties by using various AtaA polypeptides.

[0402] (Method)

[0403] Expression constructs encoding various domain deficient forms, variants, and/or mutants with a length of 237 amino acids or more and 3364 amino acids or less derived from an AtaA protein were designed by using the same method as the Examples described above, or experimental approach conventionally performed in the art that is known to those skilled in the art or a commercially available kit. Self-aggregation and/or adhesive properties of these various deficient forms, variants, or mutants were analyzed by the same method as the Examples described above.

### Example 26

### Preparation of a Fusion Peptide with a Tag and/or Protein Other than a SNAP Protein

[0404] In this Example, a SpyTag/SpyCatcher system was introduced to an immobilization technology to establish a technology for immobilizing a protein onto a material surface by preparing a fusion protein with a tag and/or protein other than a SNAP protein.

[0405] (Method)

[0406] (Construction of SpyCatcher-Nhead Expressing Plasmid)

[0407] A DNA fragment comprising a region other than a SNAP tag was amplified by PCR using pIBA-SNAP-AtaA₃₂₅-GCN4tri-His as a template, and a DNA fragment comprising SpyCatcher was amplified by PCR using pDEST14-SpyCatcher002 (Addgene) as a template. These fragments were attached by NEBuilder HiFi DNA Assembly to construct pIBA-SpyCatcher-AtaA₅₃₂₅-GCN4tri-His (SEQ ID NO: 36) (FIG. 27)

[0408] Primers used

(SEQ ID NO: 38)
1. GGATCCAGTGGTAGCGGAGGAGGTGGAGGTGCTAC
(SEQ ID NO: 39)
2. GATGTCGTAATCCATTTTTTGCCCTCGTTATCTAG
(SEQ ID NO: 40)
3. GATTACGACATCCCAACG
(SEQ ID NO: 41)
4. GCTACCACTGGATCCAGTATG

[0409] (Construction of SpyTag-GFP Expressing Plasmid)

[0410] DNA fragments comprising GFP and a vector region were each amplified by PCR using piVEX-SNAP-GFP (Addgene) as a template. The fragments were attached by NEBuilder HiFi DNA Assembly to construct pIVEX-SpyTag-GFP-his (SEQ ID NO: 37) (FIG. 28).

[0411] Primers used

(SEQ ID NO: 42)
1. GGTCATCACCACCATCATCATTAATGAGGATCCGGCTG
(SEQ ID NO: 43)
2. AGGCGTCCACCATCACGATAGTAGGCACCATGGAGCCCAGGCCCA
(SEQ ID NO: 44)
3. TGATGGTGGACGCCTACAAGCGTTACAAGGGCTTGGGAAGCGGCCG
(SEQ ID NO: 45)
4. ATGGTGGTGATGACCGCCTCCTTTGTAGAGCTCATCCATG

[0412] (Expression and Purification of SpyCatcher-Nhead (SEQ ID NO: 36))

[0413] 20 ml of bacterial culture cultured overnight at 37° C. was seeded in a 2L LB medium (100 μg/ml Amp). After shake culture for 3 hours at 37° C., AHTC was added as an inducer so that the concentration would be 200 μg/l, and the bacteria were subjected to shake culture for 4 hours at 28° C. Bacteria were harvested by centrifugation (6,000 rpm, 10 min, 4° C., R12A6 rotor; Hitachi Koki). The bacteria were suspended in 200 ml of lysis buffer (25 mM Tris-HCl, 150 mM NaCl, 20 mM Imidazole, pH 9.0). The suspended bacteria were crushed for 10 minutes at 1000 bar with a French press (LAB2000; SMT COMPANY) and centrifuged (9,000 rpm, 10 min, 4° C., R12A6 rotor). The supernatant of the crushed solution was passed through Ni-NTA Superflow beads (Qiagen) equilibriated with a lysis buffer, and then 10 ml of wash buffer (25 mM Tris-HCl, 150 mM NaCl, 50 mM Imidazole, pH 9.0) and 50 ml of elution buffer (25 mM Tris-HCl, 150 mM NaCl, 400 mM Imidazole, pH 9.0) were passed through to elute out the proteins adsorbed to a column. The retrieved protein solution was subjected to anion exchange column chromatography using a HiTrap Q HP column (column volume 5 ml; GE Healthcare). As the buffer, 25 mM Tris-HCl (pH 9.0) was used for elution over a concentration gradient of 0-2M

[0414] NaCl. An elution fraction comprising SpyCatcher-Nhead was collected and dialyzed to 50 mM Phosphate-NaOH (pH 6.0) at 4° C. by using a dialysis tube (Standard RC Tubing MWCO: 12-14 kD; Spectra/por 4 Dialysis Membrane). The solution was collected from the tube and subjected to cation exchange column chromatography using a HiTrap SP HP column (column volume 5 ml; GE Healthcare). As the buffer, 50 mM Phosphate-NaOH (pH 6.0) was used for elution over a concentration gradient of 0-2M NaCl. An elution fraction comprising SpyCatcher-Nhead was collected and subjected to gel filtration column chromatography in a Superdex 200 column (column volume 320 ml; GE Healthcare) by using 25 mM Tris-HCl (pH 9.0). An elution fraction comprising SpyCatcher-Nhead was collected and concentrated through ultrafiltration using Amicon Ultra-15 Centrifugal filters Ultracel-10k (Merck MILLIPORE), and the buffer was exchanged with 25mM Tris-HCl (pH 7.0). The concentration of proteins after concentration was measured through a BCA assay (Pierce BCA Protein Assay Kit; Thermo Fisher Scientific).

[0415] (Expression and Purification of SpyTag-GFP (SEQ ID NO: 37))

[0416] 20 ml of bacterial culture cultured overnight at 37° C. was seeded in a 2L LB medium (100 μg/ml Amp). After shake culture for 7 hours at 37° C., isopropyl-p-thiogalactopvranoside (IPTG) was added as an inducer to be 1 mM, and the bacteria were subjected to shake culture for 3 hours at 37° C. Bacteria were harvested by centrifugation (6,000 rpm, 10 min, 4° C., R12A6 rotor; Hitachi Koki). The bacteria were suspended in 200 ml of lysis buffer (25 mM Tris-HCl, 150 mM NaCl, 20 mM Imidazole, pH 9.0). The suspended bacteria were crushed for 10 minutes at 1000 bar with a French press (LAB2000; SMT COMPANY) and centrifuged (9,000 rpm, 10 min, 4° C., R12A6 rotor). The supernatant of crushed solution was passed through Ni-NTA Superflow beads (Qiagen) equilibriated with a lysis buffer, and then 10 ml of wash buffer (25 mM Tris-HCl, 150 mM NaCl, 50 mM Imidazole, pH 9.0) and 50 ml of elution buffer (25 mM Tris-HCl, 150 mM NaCl, 400 mM Imidazole, pH 9.0) were passed through to elute out the proteins adsorbed to a column. The retrieved protein solution was subjected to anion exchange column chromatography using HiTrap Q HP column (column volume 5 ml; GE Healthcare). As the buffer, 25 mM Tris-HCl (pH 9.0) was used for elution over a concentration gradient of 0-2M NaCl. A pass-through fraction comprising SpyCatcher-Nhead was collected and subjected to gel filtration column chromatography in a Superdex 200 column (column volume 320 ml; GE Healthcare) by using 25 mM iris-HCl (pH 9.0). An elution fraction comprising SpyCatcher-Nhead was collected and concentrated through ultrafiltration using Amicon Ultra-15 Centrifugal filters Ultracel-10 k (Merck MILLIPORE), and the buffer was exchanged with 25 mM Tris-HCl (pH 7.0). The concentration of proteins after concentration was measured through a BCA assay (Pierce BCA Protein Assay Kit; Thermo Fisher Scientific).

[0417] (SpyTag-GFP and SpyCatcher-Nhead attachment test)

[0418] Nhead-SpyCatcher and SpyTag-GFP-his were each adjusted to 1 μM by using 25 mM Tris-HCl (pH7). 20 μl of Nhead-SpyCatcher solution and 20 pl of SpyTag-GFP-his solution were mixed and left for 5 minutes at 37° C. The change in mobility was then studied through SDS-PAGE or CBB staining (FIG. 29).

[0419] (Immobilization of SpyTag-GFP to a Polystyrene Plate Using SpyCatcher-Nhead)

[0420] Nhead-SpyCatcher, SpyTag-GFP-his, and Nhead were each adjusted to 0.2 μM by using PBS. 100 μl of Nhead-SpyCatcher solution, Nhead solution, or PBS was added dropwise to a 96-well black polystyrene plate for fluorescence measurement (655086; Greiner Bio-One) and left for 1 hour at 28° C. The solution was removed from each well by pipetting and then washed twice with 100 μl of PBS. 100 μl of SpyTag-GFP-his solution was added dropwise into the well after washing, left for 5 minutes at 37° C., and then each well was washed 5 times with 100 pi of PBS. 100 μl of PBS was added to the well after washing, and fluorescence intensity of excitation wavelength 485 nm/fluorescence wavelength 535 nm was measured with a plate reader (ARVO X3; Perkin Elmer) (FIG. 30).

[0421] (Results)

[0422] FIG. 30 shows the results. It was demonstrated that a protein can be immobilized onto a material surface via Nhead even in a system using a SpyTag/SpyCatcher system.

[0423] (Note)

[0424] As described above, the present disclosure is exemplified by the use of its preferred embodiments. However, the above descriptions and examples are provided for purposes of illustration only and not for the purpose of limiting the present disclosure. Accordingly, it is understood that the present invention is not limited to the embodiments or examples specifically described herein and the scope of the present disclosure should be interpreted solely based on the Claims. It is also understood that any patent, any patent application, and any references cited herein should be incorporated herein by reference in the same manner as the contents are specifically described herein. The present application claims priority to Japanese Patent Application No. 2019-132488 filed on July 18, 2019 with the Japan Patent Office. It is understood that the entire content thereof is incorporated herein by reference.

### INDUSTRIAL APPLICABILITY

[0425] The present disclosure has utility in industries that use bioprocesses.

### SEQUENCE LISTING FREE TEXT

[0426] SEQ ID NO: 1: amino acid sequence of AtaA fragment including methionine at the starting position, excluding the signal peptide
[0427] SEQ ID NO: 2: nucleic acid sequence of AtaA fragment including methionine at the starting position, excluding the signal peptide
[0428] SEQ ID NO: 3: full-length nucleic acid sequence of AtaA
[0429] SEQ ID NO: 4: full-length amino acid sequence of AtaA
[0430] SEQ ID NO: 5: sequence of a primer used in cloning ataA
[0431] SEQ ID NO: 6: nucleic acid sequence of AtaA with a structure that is deficient of Nhead (Example 2)
[0432] SEQ ID NO: 7: amino acid sequence of AtaA with a structure that is deficient of Nhead (Example 2)
[0433] SEQ ID NO: 8: nucleic acid sequence of AtaA with a structure that is deficient of a part of Nstalk (Example 2)
[0434] SEQ ID NO: 9: amino acid sequence of AtaA with a structure that is deficient of a part of Nstalk (Example 2)
[0435] SEQ ID NO: 10: nucleic acid sequence of AtaA with a structure that is deficient of a part of Nstalk (Example 2)
[0436] SEQ ID NO: 11: amino acid sequence of AtaA with a structure that is deficient of a part of Nstalk (Example 2)
[0437] SEQ ID NO: 12: nucleic acid sequence of AtaA with a structure that is deficient of a part of Nstalk (Example 2)
[0438] SEQ ID NO: 13: amino acid sequence of AtaA with a structure that is deficient of a part of Nstalk (Example 2)
[0439] SEQ ID NO: 14: nucleic acid sequence of AtaA with a structure that is deficient of Chead in addition to a part of Nstalk (Example 2)
[0440] SEQ ID NO: 15: amino acid sequence of AtaA with a structure that is deficient of Chead in addition to a part of Nstalk (Example 2)
[0441] SEQ ID NO: 16: nucleic acid sequence of AtaA with a structure that is deficient of the majority of Cstalk (while the FGG domain is preserved) (Example 2)
[0442] SEQ ID NO: 17: amino acid sequence of AtaA with a structure that is deficient of the majority of Cstalk (while the FGG domain is preserved) (Example 2)
[0443] SEQ ID NO: 18: nucleic acid sequence of AtaA₅₉₋₃₂₅GCN4pII-His (Example 3)
[0444] SEQ ID NO: 19: amino acid sequence of AtaA₅₉₋₃₂₅-GCN4pII-His (Example 3)
[0445] SEQ ID NO: 20: nucleic acid sequence of a Δ1st loop variant of AtaA (Example 4)
[0446] SEQ ID NO: 21: amino acid sequence of a Δ1st loop variant of AtaA (Example 4)
[0447] SEQ ID NO: 22: nucleic acid sequence of a Δ2nd loop variant of AtaA (Example 4)
[0448] SEQ ID NO: 23: amino acid sequence of a Δ2nd loop variant of AtaA (Example 4)
[0449] SEQ ID NO: 24: nucleic acid sequence of a WChead variant of AtaA (Example 8)
[0450] SEQ ID NO: 25: amino acid sequence of a WChead variant of AtaA (Example 8)
[0451] SEQ ID NO: 26: nucleic acid sequence of AtaA₅₉₋₃₂₅-GCN4pII-SNAP-His (Example 9)
[0452] SEQ ID NO: 27: amino acid sequence of AtaA₅₉₋₃₂₅-GCN4pII-SNAP-His (Example 9)
[0453] SEQ ID NO: 28: nucleic acid sequence of SNAP-AtaA₅₉₋₃₂₅-GCN4pII-His (Example 12)
[0454] SEQ ID NO: 29: amino acid sequence of SNAP-AtaA₆₀₋₃₂₅-GCN4pII-His (Example 12)
[0455] SEQ ID NO: 30: nucleic acid sequence of AtaA₅₉₋₃₂₅-SNAP-His (Example 14)
[0456] SEQ ID NO: 31: amino acid sequence of AtaA₅₉₋₃₂₅-SNAP-His (Example 14)
[0457] SEQ ID NO: 32: nucleic acid sequence of AtaA₅₉₋₃₂₅-GCN4pII-SNAP-His (Example 15)
[0458] SEQ ID NO: 33: amino acid sequence of AtaA₅₉₋₃₁₄-GCN4pII-SNAP-His (Example 15)
[0459] SEQ ID NO: 34: nucleic acid sequence of NhNs-SNAP (Example 22)
[0460] SEQ ID NO: 35: amino acid sequence of NhNs-SNAP (Example 22)
[0461] SEQ ID NO: 36: amino acid sequence of SpyCatcher-Nhead

[0462] (Example 26)
[0463] SEQ ID NO: 37: amino acid sequence of SpyTag-GFP (Example 26)
[0464] SEQ ID NO: 38: sequence of a primer used for constructing a SpyCatcher-Nhead expressing plasmid (Example 26)
[0465] SEQ ID NO: 39: sequence of a primer used for constructing a SpyCatcher-Nhead expressing plasmid (Example 26)
[0466] SEQ ID NO: 40: sequence of a primer used for constructing a SpyCatcher-Nhead expressing plasmid (Example 26)
[0467] SEQ ID NO: 41: sequence of a primer used for constructing a SpyCatcher-Nhead expressing plasmid (Example 26)
[0468] SEQ ID NO: 42: sequence of a primer used for constructing a SpvTag-GFP expressing plasmid (Example 26)
[0469] SEQ ID NO: 43: sequence of a primer used for constructing a SpyTag-GFP expressing plasmid (Example 26)
[0470] SEQ ID NO: 44: sequence of a primer used for constructing a SpyTag-GFP expressing plasmid (Example 26)
[0471] SEQ ID NO: 45: sequence of a primer used for constructing a SpyTag-GFP expressing plasmid (Example 26)

1-26. (canceled)

27. A method for causing either one or both of adhesion and immobilization of a first substance to a second substance, comprising:
contacting the first substance and the second substance,
wherein at least one of said first and second substances comprises
(a) a polypeptide which comprises a fragment of the amino acid sequence set forth in SEQ ID NO: 1 or a variant sequence thereof, wherein the polypeptide does not have a self-aggregation property and has an adhesive property, or
(b) a complex which comprises the polypeptide of (a) and a functionality-imparting entity,
and wherein said step of contacting takes place under conditions that allow adhesion or immobilization of the first substance to the second substance.

28. The method of claim 27 which causes monolayer adhesion of the first substance to the second substance.

29. The method of claim 27, wherein the first substance and the second substance are the same.

30. The method of claim 27, wherein the first substance and the second substance are different.

31. The method of claim 27, wherein at least one of the first substance and the second substance is the complex which comprises the functionality-imparting entity.

32. The method of claim 31, wherein the functionality-imparting entity is a peptide and/or a protein.

33. The method of claim 32, wherein the functionality-imparting entity is streptavidin, neutral avidin, or a variant thereof.

34. The method of claim 31, wherein the functionality-imparting entity is a cell.

35. The method of claim 27, wherein the second substance comprise a support.

36. The method of claim 35, wherein the support is a liposome.

37. A method for causing either one or both of adhesion and immobilization of a first substance to a second substance, comprising:
contacting the first substance and the second substance, wherein said step of contacting takes place under conditions that allow adhesion or immobilization of the first substance to the second substance without self-aggregation of said first and second substances, and wherein at least one of said first and second substances comprises
(a) a polypeptide which comprises (i) a fragment of the amino acid sequence set forth in SEQ ID NO: 1 or a variant sequence thereof, wherein the polypeptide does not have a self-aggregation property and has an adhesive property, said polypeptide further comprising (ii) an amino acid sequence that is different from SEQ ID NO: 1, or
(b) a complex which comprises the polypeptide of (a) and a functionality-imparting entity.

38-50. (canceled)

51. The method of claim 37 wherein the amino acid sequence that is different from SEQ ID NO: 1 is fused to the polypeptide which comprises a fragment of the amino acid sequence set forth in SEQ ID NO: 1 or the variant sequence thereof, wherein the polypeptide does not have a self-aggregation property and has an adhesive property.

52. The method of claim 37 which causes monolayer adhesion of the first substance to the second substance.

53. The method of claim 37 , wherein the first substance and the second substance are the same.

54. The method of claim 37 , wherein the first substance and the second substance are different.

55. The method of claim 37, wherein at least one of the first substance and the second substance is the complex which comprises the functionality-imparting entity.

56. The method of claim 55, wherein the functionality-imparting entity is a peptide and/or a protein.

57. The method of claim 56, wherein the functionality-imparting entity is streptavidin, neutral avidin, or a variant thereof

58. The method of claim 55, wherein the functionality-imparting entity is a cell.

59. The method of claim 37, wherein the second substance comprises a support.

60. The method of claim 59, wherein the support is a liposome.

The application's sequence listing, which the Patent Office published only in electronic form, follows.

SEQUENCE LISTING (45 sequences)

SEQ ID NO: 1 - protein, 3518 aa, artificial sequence
  Fragment of AtaA
MATVQVGGGTNSGTTATASTNCADLYNYQNPENSGSGAAGNYNAGNPSVCSIAIGENAQGGTSGTGGSPGIAIGGNSKATGGLSVAIGGYAQATNVGSIALGTAALSSGFNSLAISRQAAATNNYSIAIGTTSVSKGVGSIAMGHSTNASGDQSIAIGSSDAVNSATATTTYDGTTNTQASGSKSIAIGASAKASTNNSIALGAGSVTSAQSGNSYLTGVGASATNGVVSVGTSTATRRIQNVADGSAASDAVTVAQLDKAYDDTNGRLAAALGTGSGAAYNAANNTYTAPTNIGGTGKNTIDDAIKATQRSVVAGSNIVVTPTTASDGSISYSVATSATPTFTSITVNNAPTAGTDATNKTYVDSKAAASRTEVAAGSNVSGVVKTTGANGQDVYTVNANGTTASAGSSAVTVTPGTKDANNVTDYKVDLSATTKTDIQKGVDAKNAVDTAGLKFKGDTATTSNTKKLGDTVSITGDTNISTVATTDGVQVKLNPNLDLGATGSVKTGNTTINNAGVTADQVTVGGVVINNTSGINAGGKAITNVAAPTNNTDAANKKYVDDAGTALTNLGFGLKAQDGTTVNKKLGEAVDIVGSNSNISTKVNAGKVEVALSNTLDLGTTGSVTTGSTVINNAGVTATQVTANKVTINNAPTAGTDATNKTYVDSKAAASRTEVAAGSNVSGVVKTTGANGQDIYAVNANGTTASAGSSAVTVTPGTKDANNVTDYKVDLSATTKTDIQKGVDAKNAVDTAGLKFKGDTATTSNTKKLGDTVSITGDTNISTVATTDGVQVKLNPNLDLGATGSVKTGNTTINNAGVTADQVTVGGVVINNTSGINAGGKAITNVAAPTNNTDAANKKYVDDAGTALTNLGFGLKAQDGTTVNKKLGEAVDIVGSNSNISTKVNAGKVEVALSNTLDLGTTGSVTTGSTVINNAGVTATQVTANKVTVNNAPTAGTDATNKTYVDSKAAASRTEVAAGSNVSGVVKTTGANGQDVYTVNANGTTASAGSSAVTVTPGTKDANNVTDYKVDLSATTKTDIQKGVDAKNAVDTAGLKFKGDTATTSNTKKLGDTVSITGDTNISTVATTDGVQVKLNPNLDLGATGSVKTGNTTINNAGVTADQVTVGGVVINNTSGINAGGKAITNVAAPTNNTDAANKKYVDDAGTALTNLGFGLKAQDGTTVNKKLGEAVEVVGADSNITTKVAGGQVAIELNKNLNNLTGITVNDGTNGTNGSTVIGKDGISVKDGSGNTIAGVDNTALTVKDGSGNTETSINQAINTLNAAQGETDKFAVKYDKNADGSVNYNNITLAGTTASSTQDATTGKITTTGGTSLNNVASAGDYKDVANASKGVNAGDLNNAVVDATNAATSKGFALQAADGAKVQKNLGEAVEVVGADSNITTKVAGGQVAIELNKNLNNLTGITVNDGTNGTNGSTVIGKDGISVKDGSGNTIAGVDNTALTVKDGSGNTETSINQAINTLNAAQGETDKFAVKYDKNTDGSTNYNSITAGNGNGTAATIGTDTAGNSVVTSGGTKISNVANGVNASDAVNKGQLDSLSTGLTNTGFGLKAADGNTVNKKLGEAVDVVGADSNITTKVAGGQVAIELNKNLNNLTGITVNDGTNGTNGSTVIGKDGISIKDGSGNTIAGVDNTALTVKDGSGNTETSINQAINTLNAAQGETDKFAVKYDKNADGSANYNNITLAGTTASSTQDATTGKITTTGGTSLNNVASAGDYKDVANASKGVNAGDLNNAVVDATNAATSKGFALQAADGAKVQKNLGEAVEVVGADSNITTKVVGGQVAIELNKNLNNLTGITVNDGTNGTNGSTVIGKDGISVKDGSGNTIAGVDNTALTVKDGSGNTETSINQAINTLNAAQGETDKFAVKYDKNADGSVNYNNITLAGTTASSTQDATTGKITTTGGTSLNNVASAGDYKDVANASKGVNAGDLNNAVVDATNAATSKGFALQAADGAKVQKNLGEAVEVVGADSNITTKVAGGQVAIELNKNLNNLTGITVNDGTNGTNGSTVIGKDGISVKDGSGNTIAGVDNTALTVKDGSGNTETSINQAINTLNAAQGETDKFAVKYDKNADGSVNYNNITLAGTTASSTQDATTGKITTTGGTSLNNVASAGDYKDVANASKGVNAGDLNNAVVDATNAATSKGFALQAADGAKVQKNLGEAVEVVGADSNITTKVAGGQVAIELNKNLNNLTGITVNDGTNGTNGSTVIGKDGISVKDGSGNTIAGVDNTALTVKDGSGNTETSINQAINTLNAAQGETDKFAVKYDKNADGSANYNNVTLAGTNGTIISNVKAGAVTSTSTDAINGSQLYGVANSVKNAIGGSTTIDATTGAITTTNIGGTGSNTIDGAISSIKDSATKAKTTVSAGDNVVVTSGTNADGSTNYEVATAKDVNFDKVTVGSVVVDKSSNTIKGLSNTTWNGTAVSGQAATEDQLKTVSDAQGETDKFAVKYDKNADGSANYNSITAGNGNGTAATIGTDTAGNSVVTSGGTKISNVANGVNASDAVNKGQLDSLSTGLTNTGFGLKAADGNTVNKKLGEAVDVVGADSNITTKVAGGQVAIELNKNLNNLTGITVNDGTNGTNGSTVIGKDGISIKDGSGNTIAGVDNTALTVKDSSGNTETSINQAINTLNAAQGETDKFAVKYDKNADGSVNYNNVTLAGTNGTIIRNVKAGAVTSTSTDAINGSQLYDIANSVKNAIGGSTTRDVTTGAITTTNIGGTGSNTIDGAISSIKDSATKAKTTISAGDNVVVTSGTNADGSTNYEVATAKDVNFDKVTVGNVVVDKANDTIQGLSNKDLNSTDFATKGRAATEEQLKAVITSNITEVVDGNGNKVNIIDQVVNTKPDNKNQDSLFLTYDKQGQETTDRLTIGQTVQKMNTDGIKFFHTNADTSKGDLGTTNDSSAGGLNSTAIGVNAIVANGADSSVALGHNTKVNGKQSIAIGSGAEALGNQSISIGTGNKVTGDHSGAIGDPTIVNGANSYSVGNNNQVLTDDTFVLGNNVTKTIAGSVVLGNGSAATTGAGEAGYALSVATNADKAAITKTTSSTGAVAVGDASSGIYRQITGVAAGSVDSDAVNVAQLKAVGNQVVTTQTTLVNSLGGNAKVNADGTITGPTYNVAQGNQTNVGDALTALDNAINTAATTSKSTVSNGQNIVVSKSKNADGSDNYEVSTAKDLTVDSVKAGDTVLNNAGITIGNNAVVLNNTGLTISGGPSVTLAGIDAGNKTIQNVANAVNATDAVNKGQLDSAINNVNNNVNELANNAVKYDDASKDKITLGGGATGTTITNVKDGTVAQGSKDAVNGGQLWNVQQQVDQNTTDISNIKNDINNGTVGLVQQAGKDAPVTVAKDTGGTTVNVAGTDGNRVVTGVKEGAVNATSKDAVNGSQLNTTNQAVVNYLGGGAGYDNITGSFTAPSYTVGDSKYNNVGGAIDALNQADQALNSKIDNVSNKLDNAFRITNNRIDDVEKKANAGIAAAMALESAPYVPG

SEQ ID NO: 2 - DNA, 10554 bp, artificial sequence
  Fragment of AtaA
atggctactgttcaagttggagggggaactaattctggaacaactgctacagcttctacgaattgtgcagacttatataattatcaaaatcctgagaactcaggctctggagcggctgggaattataatgcaggaaatccaagtgtgtgttcgatcgctataggtgaaaacgcacaaggtggtacttctggaactggagggtcgccagggatagcgataggtggaaattctaaagctacgggtggtttatctgttgctataggcggatatgctcaagcgacaaatgttggaagtattgctttaggcacagcagctttatcaagtggttttaacagtttagcaatatccagacaagctgctgcaacgaataactattcaatagctataggtacaacttcagtttcgaaaggagttggatcgattgctatggggcattcaacgaatgcttctggagatcaatcgatagcaattggtagctcggatgctgttaattcagcaacagcaacaacaacatacgatggtacaacaaatactcaagcatcaggtagtaaatcgattgctataggtgcaagcgcaaaggcatcaaccaataacagcattgcactaggtgcaggatcggtaacttctgcacaatctggtaattcttatcttactggtgtaggtgcatcagctacaaatggtgttgtatctgttggaacttcaactgcaacacgtcgtatccaaaatgtagcagatggttcagccgcttcagatgctgtgacagttgctcagttggataaagcttatgatgatacaaatggtcgtttagctgctgctttaggtacaggtagtggtgctgcctataatgcagcaaacaatacatataccgctccaacgaatattgggggaacaggtaaaaatacgattgatgatgcaattaaagcaactcaacgaagtgtagtcgctggatcaaatattgtcgttaccccgacgacagcttctgatggttcaatatcgtattcggttgctacaagcgcaacaccgacgtttacaagtataactgtaaacaatgcaccaacggcaggtacagatgcgaccaacaagacttatgtagactcaaaagcagcagcatcgagaacagaagtagcagctggaagcaatgtatctggtgtagtaaaaacgacaggcgcaaacggtcaagacgtttatacagtaaatgccaatggtacgactgcatcagcaggttcttcagcagttaccgtaacaccaggcacgaaagatgcaaataatgtcactgactataaagtagacttatcagcgactacaaaaaccgatatccaaaaaggtgtagatgcaaaaaatgctgtagataccgcaggtctaaaatttaaaggtgatacagcaaccacaagcaataccaagaaattaggtgacaccgtttcgattacgggtgatacgaacattagtacagttgcgacaacagatggtgtacaggttaagttaaatccaaacttggatttaggagcaactggtagcgttaaaacgggtaataccacgattaacaatgcaggtgtaacagctgatcaagttacggttggtggtgttgttattaacaacacatcaggtattaatgctggtggtaaagcgattactaatgtagcagcaccaacaaataacacagatgctgctaacaagaagtatgtagatgatgcaggtacagcattaaccaatttgggctttggattaaaagcacaagatggtacgactgtgaacaagaaattaggtgaagcagttgatattgttggttcaaacagcaacatcagtacaaaagtaaatgcaggcaaagtagaagttgcactatccaatacattggacttaggtactacaggtagcgttactacgggttcaactgtaattaacaatgctggtgttacggcaactcaagttaccgcaaacaaagtcacaataaacaatgcaccaacagcaggtacagatgcgaccaacaagacttatgtagactcaaaagcagcagcatcaagaacagaagtcgcagctggaagcaatgtatctggtgtagtaaaaacgacaggcgcaaacggtcaagatatttatgcagtaaatgccaatggtacgactgcatcagcaggttcttcagcagttaccgtaacaccaggcacgaaagatgcaaataatgtcactgactataaagtagacttgtcagcgactacaaaaaccgatattcaaaaaggtgtagatgcaaaaaatgctgtagatactgcaggtctaaaatttaaaggtgatacagcaaccacaagcaataccaagaaattaggtgacaccgtttcgattacgggtgatacgaacattagtacagttgcaacaactgatggtgtacaggttaagttaaatccaaacttagatttaggagcaactggtagcgttaaaacgggtaataccacgattaacaatgcaggtgtaacagctgaccaagttacggttggtggtgttgttattaacaacacatcaggtattaatgctggtggtaaagcgattaccaatgtagcagcaccaacaaataacacagatgctgctaacaagaagtatgtagatgacgcaggtacagcattaaccaatttgggctttggattaaaagcgcaagatggtacgactgtgaacaagaaattaggtgaagcagttgatattgttggttcaaacagcaacatcagtacaaaagtaaatgcaggcaaagtagaagttgcactatccaatacattggacttaggtactacaggtagcgttactacgggttcaactgtaattaacaatgctggtgttacggcaactcaagttaccgcaaacaaagtcacagttaataatgcaccaacagcaggtacagatgcgaccaataaaacttatgtagactcaaaagcagcggcatcaagaacagaagtcgcagctggaagcaatgtatctggcgtagtaaaaacgacaggtgcaaacggtcaagacgtttatacagtaaatgccaatggtacgactgcatcagcaggttcttcagcagttaccgtaacaccaggcacgaaagatgcaaataatgtcactgactataaagtagacttgtcagcgactacaaaaaccgatattcaaaaaggtgtagatgcaaaaaatgctgtagataccgcaggtctaaaatttaaaggtgatacagcaaccacaagcaataccaagaaattaggtgacaccgtttcgattacgggtgatacgaacattagtacagttgcgacaactgatggtgtacaggttaagctaaatccaaacttggatttaggagcaactggtagcgttaaaacgggtaataccacgattaacaatgcaggtgtaacagctgatcaagttacagttggtggtgttgttattaacaacacatcaggtattaatgctggtggtaaagcgattaccaatgtagcagcaccaacaaataacacagatgctgctaacaagaagtatgtagatgatgcaggtacagcattaaccaatttgggctttggattaaaagcgcaagatggtacgactgtgaacaagaaattaggcgaagcagttgaagttgttggtgcggacagtaacatcaccacgaaagttgcaggcggtcaggttgcaattgagttaaataaaaacctcaacaacttaactggcattaccgtgaacgatggaaccaatggcaccaatggttcaactgtgattggtaaagatggtatttcggttaaagatggttcaggcaataccattgcaggtgtagataacacagcgttgacagttaaagatggcagtggcaacacagaaaccagcattaaccaagcgatcaacacgttaaatgcagcgcaaggtgaaactgataagtttgcagtgaagtacgacaaaaatgctgatggcagtgtgaactacaacaacatcacattggcaggtacgactgcaagcagtacacaagatgcaactacaggcaagatcaccacaacaggtggaacaagcttgaacaatgttgcaagtgcgggtgactacaaagatgttgccaatgcaagcaaaggtgtaaacgcaggtgacttaaacaatgcagttgttgatgcaaccaatgcagcaaccagcaaaggctttgcattacaagcagcagatggcgctaaagttcagaagaacctaggcgaagcagttgaagttgtcggtgccgacagcaacatcaccacaaaagttgcaggcggtcaggttgcaattgagttaaataaaaacctcaacaacttaactggcattaccgtgaacgatggaaccaatggcaccaatggttcaactgtgattggtaaagatggtatttcagttaaagacggttcaggcaataccattgcaggtgtagataacacagcgttgacagttaaagatggcagtggcaacacagaaaccagcattaaccaagcgatcaacacgttaaatgcagcgcaaggtgaaactgataagtttgcagtgaagtacgacaaaaatacggatggtagtaccaactacaacagtattactgcaggcaatggtaacggtactgcagcaacgatcggaactgacacagcaggtaatagtgttgtgaccagtggcggaactaaaattagtaatgttgcgaatggtgtcaatgcaagtgatgcagtaaacaaaggtcaattggatagcttaagtacaggtcttaccaatacaggctttggtttaaaagcagcagatggcaacaccgttaacaaaaaattaggcgaagcagtagacgttgtcggtgctgacagcaacatcaccacgaaagttgcaggcggtcaggttgcgattgagttaaataaaaacctcaacaacttaactggcattaccgtgaacgatggaaccaatggcaccaatggttcaactgtgattggtaaagatggtatttcgattaaagatggttcaggcaataccattgcaggtgtagataacacagcgttgacagttaaagatggcagtggcaacacagaaaccagcattaaccaagcgatcaacacgttaaatgcagcgcaaggtgaaactgacaagtttgcagtgaagtacgacaagaatgctgatggcagtgcaaactacaacaacatcacattggcaggtacgactgcaagtagcacgcaagatgcaacaacaggcaagatcaccacaacaggtggaacaagcttgaacaacgttgcaagtgcaggtgactacaaagatgttgccaatgcaagcaaaggtgtaaacgcaggtgacttgaacaatgcagttgttgatgcaaccaatgcagcaaccagcaaaggctttgcattacaagcagcagatggcgctaaagttcagaagaacctaggcgaagcagttgaagttgtcggtgcggacagcaacatcaccacaaaagtagtgggtggacaagttgcgattgagttaaataaaaacctcaacaacttaactggcattaccgtgaacgatggaaccaatggcacaaatggttcaactgtgattggtaaagatggtatttcggttaaagatggttcaggtaataccattgcaggtgtagataacacagcgttgacagttaaagatggcagtggcaacacagaaaccagcattaaccaagcgatcaacacgttaaatgcagcgcaaggtgaaactgataagtttgcagtgaagtacgacaaaaatgctgatggcagtgtgaactacaacaacatcacattggcaggtacgactgcaagcagtacacaagatgcaactacaggcaagatcaccacaacaggtggaacaagcttgaacaatgttgcaagtgcgggtgactacaaagatgttgccaatgcaagcaaaggtgtaaacgcaggtgacttaaacaatgcagttgttgatgcaaccaatgcagcaaccagcaaaggctttgcattacaagcagcagatggcgctaaagttcagaagaacctaggcgaagcagttgaagttgtcggtgccgacagcaacatcaccacaaaagttgcaggcggtcaggttgcaattgagttaaataaaaacctcaacaacttaactggcattaccgtgaacgatggaaccaatggcaccaatggttcaactgtgattggtaaagatggtatttcagttaaagacggttcaggcaataccattgcaggtgtagataacacagcgttgacagttaaagatggcagtggcaacacagaaaccagcattaaccaagcgatcaacacgttaaatgcagcgcaaggtgaaactgataagtttgcagtgaagtacgacaaaaatgctgatggcagtgtgaactacaacaacatcacattggcaggtacgactgcaagcagtacacaagatgcaactacaggcaagatcaccacaacaggtggtacaagcttgaacaatgttgcaagtgcgggtgactacaaagatgttgccaatgcaagcaaaggtgtaaacgcaggtgacttgaacaatgcagttgttgatgcaaccaatgcagcgaccagcaaaggctttgcattacaagcagcagatggcgctaaagttcagaagaacctaggcgaagcagttgaagttgttggtgcggacagtaacatcaccacgaaagttgcaggcggtcaggttgcaattgagttaaataaaaacctcaacaacttaactggcattaccgtgaacgatggaaccaatggcaccaatggttcaactgtgattggtaaagatggtatttcggttaaagatggttcaggcaataccattgcaggtgtagataacacagcgttgacagttaaagatggcagtggcaacacagaaaccagcattaaccaagcgatcaacacgttaaatgcagcgcaaggtgaaactgataagtttgcagtgaagtacgacaaaaatgctgatggcagtgcaaactataacaatgtcactttagctggtacaaatggcacaataatcagcaatgttaaagcgggtgctgtgacctcaacatctactgatgcgatcaatggtagccaattatatggtgttgcaaacagcgtgaagaatgcaattggtggttcaaccacaattgatgcaacgactggtgcaatcacgacgaccaatattggtggtacaggttcaaatacgattgatggtgcaatcagcagtattaaagattcagcgactaaagcgaaaaccacggtaagtgctggggataatgttgtcgttacatcgggtaccaatgcagatggctcaacaaactatgaagttgcgacagcgaaagacgttaactttgacaaagtgactgtaggtagtgttgttgtagataaatcaagcaatacaatcaaaggattaagtaataccacttggaacggaacagcagtatcaggtcaagcggcgacagaagaccagttaaaaacggtcagcgatgcgcaaggtgaaactgataagtttgcagtgaagtacgacaaaaatgctgatggcagtgcgaactacaacagtattactgcaggcaatggtaacggtactgcagcaacgatcggaactgacacagcaggtaatagtgttgtgaccagtggcggaactaaaattagtaatgttgcgaatggtgtcaatgcaagtgatgcagtaaacaaaggtcaattggatagcttaagtacaggtcttaccaatacaggctttggtttaaaagcagcagatggcaacaccgttaacaaaaaattaggcgaagcagtagacgttgtcggtgctgacagcaacatcaccacgaaagttgcaggcggtcaggttgcgattgagttaaataaaaacctcaacaacttaactggcattaccgtgaacgatggaaccaatggcaccaatggttcaactgtgattggtaaagatggtatttcgattaaagatggttcaggcaataccattgcaggtgtagataacacagcgttgacggttaaagatagcagtggcaacacagaaaccagcattaaccaagcgatcaacacgttaaatgcagcgcaaggtgaaactgataagtttgcagtgaagtacgataagaatgctgatggcagtgtgaactataacaatgtcactttagcaggtacaaatggcacaataatcagaaatgttaaagcgggtgctgtgacctcaacatctactgatgcgatcaatggtagccaattatacgatattgcaaacagcgtgaagaatgcaattggtggttcaaccacaagagatgtaacgactggtgcaatcacaacgaccaatattggtggtacaggttcaaacacgattgatggtgcaatcagcagtattaaagattcagcgactaaagcgaaaaccacgataagtgctggggataatgttgtcgttacatcgggtaccaatgcagatggctcaacaaactatgaagttgcgacagcgaaagacgttaactttgacaaagtaactgtaggtaatgttgttgttgataaggcaaatgacacgatccaaggtttgagcaataaagatctaaattcaactgattttgcgaccaaaggtagagctgcgactgaagaacagttaaaagcagtgattaccagtaatatcacggaagttgtggatggtaatggcaacaaggtgaatattattgaccaagttgtaaataccaaacctgacaataagaaccaagattcattgttcttaacgtatgacaaacaaggtcaagaaaccacagatcgcctaacgattggtcaaacggtacagaagatgaatactgatggtattaaattcttccataccaatgccgatacatcaaaaggtgatttgggtacaacaaatgactcaagtgcaggtggtttaaactctacagcaattggtgtaaatgcgattgttgcgaatggtgcagatagttcagttgctttaggtcataacaccaaagtcaatggtaaacaatcaattgcaattggttctggtgcagaagctttaggcaatcaatcgatcagtattggtacaggcaataaagtcactggtgatcattcgggtgcgattggtgatccaactattgtaaatggtgcaaacagctactctgtgggtaataacaaccaagtacttacagatgacactttcgtacttggaaacaatgtcaccaaaactattgctggttcagtagtattgggtaacggttcagctgcaacgacaggtgctggtgaggcaggctatgccttatctgtagcaacaaatgcagataaagccgcgatcactaaaactacgtcaagcactggtgctgttgcagttggtgatgcgtcgagcggtatttatcgtcaaattaccggtgttgctgcgggtagcgtagattcagatgctgtgaacgttgcacagttaaaagcggtgggtaaccaagttgtaacgactcaaactacattggtgaacagtttgggtggtaacgctaaagtaaatgcagacggtacgattacaggaccaacttataatgttgctcaaggtaatcagaccaatgttggtgatgcattaactgcgcttgataacgcaattaatactgcggcaacaacatctaaatcgactgtttctaatggtcagaatattgttgtcagcaagagcaaaaatgcagatggttcagacaactatgaagtatcaacagcaaaagacttgacagttgattctgtcaaagcgggtgatacggttctgaataatgcaggtattacaattggcaataacgcagttgtattgaacaacactggattaaccattagtggtggaccaagtgttaccttggcaggcatcgatgcaggcaataaaaccattcaaaatgttgcgaatgcagtaaatgcaacagatgcagtcaacaaagggcaattggacagcgcaattaacaatgtgaataacaatgtaaatgagcttgccaacaacgctgttaaatatgacgatgcatcaaaagataagatcacacttggtggtggggcaactggtacaacaatcaccaatgtgaaagatggtactgttgcgcaaggttctaaagatgctgtgaatggcggtcaattgtggaatgttcaacaacaagttgatcagaacacaactgatattagcaatatcaaaaatgatattaacaacggtactgttggtttggttcaacaagcaggtaaagatgcaccagtgacggttgcaaaagatactggcggtacaacggtgaatgtcgctggaacagatggcaaccgagtagtgacaggtgttaaggaaggtgcagtgaatgcaacatctaaagatgctgtcaatggtagtcaattgaatacaaccaaccaagcggtagtcaattatcttggtggtggggcaggttatgacaacattacaggtagcttcacagcgccaagttatacggtaggtgactcgaaatacaacaatgttggtggcgcaattgatgcattgaatcaagcagatcaagcattgaatagcaaaattgacaatgtcagtaacaagttggataacgcattccgtattaccaacaaccgtattgatgatgtagagaaaaaagccaatgctggtattgccgctgcgatggctctggaatcagcaccatatgtcccaggt

SEQ ID NO: 3 - DNA, 10893 bp, Acinetobacter sp
  CDS (1)..(10893)
atgaataaaatctacaaagtgatttggaatgcgactttgttggcatgggttgcagtatctgaattggcaaaagggaaaaccaaatctacgacatcaaaatccaaagctaaatcattatcttcatctgtaatagttggtgggataatattaacaacacctttatctttaatagcagctactgttcaagttggagggggaactaattctggaacaactgctacagcttctacgaattgtgcagacttatataattatcaaaatcctgagaactcaggctctggagcggctgggaattataatgcaggaaatccaagtgtgtgttcgatcgctataggtgaaaacgcacaaggtggtacttctggaactggagggtcgccagggatagcgataggtggaaattctaaagctacgggtggtttatctgttgctataggcggatatgctcaagcgacaaatgttggaagtattgctttaggcacagcagctttatcaagtggttttaacagtttagcaatatccagacaagctgctgcaacgaataactattcaatagctataggtacaacttcagtttcgaaaggagttggatcgattgctatggggcattcaacgaatgcttctggagatcaatcgatagcaattggtagctcggatgctgttaattcagcaacagcaacaacaacatacgatggtacaacaaatactcaagcatcaggtagtaaatcgattgctataggtgcaagcgcaaaggcatcaaccaataacagcattgcactaggtgcaggatcggtaacttctgcacaatctggtaattcttatcttactggtgtaggtgcatcagctacaaatggtgttgtatctgttggaacttcaactgcaacacgtcgtatccaaaatgtagcagatggttcagccgcttcagatgctgtgacagttgctcagttggataaagcttatgatgatacaaatggtcgtttagctgctgctttaggtacaggtagtggtgctgcctataatgcagcaaacaatacatataccgctccaacgaatattgggggaacaggtaaaaatacgattgatgatgcaattaaagcaactcaacgaagtgtagtcgctggatcaaatattgtcgttaccccgacgacagcttctgatggttcaatatcgtattcggttgctacaagcgcaacaccgacgtttacaagtataactgtaaacaatgcaccaacggcaggtacagatgcgaccaacaagacttatgtagactcaaaagcagcagcatcgagaacagaagtagcagctggaagcaatgtatctggtgtagtaaaaacgacaggcgcaaacggtcaagacgtttatacagtaaatgccaatggtacgactgcatcagcaggttcttcagcagttaccgtaacaccaggcacgaaagatgcaaataatgtcactgactataaagtagacttatcagcgactacaaaaaccgatatccaaaaaggtgtagatgcaaaaaatgctgtagataccgcaggtctaaaatttaaaggtgatacagcaaccacaagcaataccaagaaattaggtgacaccgtttcgattacgggtgatacgaacattagtacagttgcgacaacagatggtgtacaggttaagttaaatccaaacttggatttaggagcaactggtagcgttaaaacgggtaataccacgattaacaatgcaggtgtaacagctgatcaagttacggttggtggtgttgttattaacaacacatcaggtattaatgctggtggtaaagcgattactaatgtagcagcaccaacaaataacacagatgctgctaacaagaagtatgtagatgatgcaggtacagcattaaccaatttgggctttggattaaaagcacaagatggtacgactgtgaacaagaaattaggtgaagcagttgatattgttggttcaaacagcaacatcagtacaaaagtaaatgcaggcaaagtagaagttgcactatccaatacattggacttaggtactacaggtagcgttactacgggttcaactgtaattaacaatgctggtgttacggcaactcaagttaccgcaaacaaagtcacaataaacaatgcaccaacagcaggtacagatgcgaccaacaagacttatgtagactcaaaagcagcagcatcaagaacagaagtcgcagctggaagcaatgtatctggtgtagtaaaaacgacaggcgcaaacggtcaagatatttatgcagtaaatgccaatggtacgactgcatcagcaggttcttcagcagttaccgtaacaccaggcacgaaagatgcaaataatgtcactgactataaagtagacttgtcagcgactacaaaaaccgatattcaaaaaggtgtagatgcaaaaaatgctgtagatactgcaggtctaaaatttaaaggtgatacagcaaccacaagcaataccaagaaattaggtgacaccgtttcgattacgggtgatacgaacattagtacagttgcaacaactgatggtgtacaggttaagttaaatccaaacttagatttaggagcaactggtagcgttaaaacgggtaataccacgattaacaatgcaggtgtaacagctgaccaagttacggttggtggtgttgttattaacaacacatcaggtattaatgctggtggtaaagcgattaccaatgtagcagcaccaacaaataacacagatgctgctaacaagaagtatgtagatgacgcaggtacagcattaaccaatttgggctttggattaaaagcgcaagatggtacgactgtgaacaagaaattaggtgaagcagttgatattgttggttcaaacagcaacatcagtacaaaagtaaatgcaggcaaagtagaagttgcactatccaatacattggacttaggtactacaggtagcgttactacgggttcaactgtaattaacaatgctggtgttacggcaactcaagttaccgcaaacaaagtcacagttaataatgcaccaacagcaggtacagatgcgaccaataaaacttatgtagactcaaaagcagcggcatcaagaacagaagtcgcagctggaagcaatgtatctggcgtagtaaaaacgacaggtgcaaacggtcaagacgtttatacagtaaatgccaatggtacgactgcatcagcaggttcttcagcagttaccgtaacaccaggcacgaaagatgcaaataatgtcactgactataaagtagacttgtcagcgactacaaaaaccgatattcaaaaaggtgtagatgcaaaaaatgctgtagataccgcaggtctaaaatttaaaggtgatacagcaaccacaagcaataccaagaaattaggtgacaccgtttcgattacgggtgatacgaacattagtacagttgcgacaactgatggtgtacaggttaagctaaatccaaacttggatttaggagcaactggtagcgttaaaacgggtaataccacgattaacaatgcaggtgtaacagctgatcaagttacagttggtggtgttgttattaacaacacatcaggtattaatgctggtggtaaagcgattaccaatgtagcagcaccaacaaataacacagatgctgctaacaagaagtatgtagatgatgcaggtacagcattaaccaatttgggctttggattaaaagcgcaagatggtacgactgtgaacaagaaattaggcgaagcagttgaagttgttggtgcggacagtaacatcaccacgaaagttgcaggcggtcaggttgcaattgagttaaataaaaacctcaacaacttaactggcattaccgtgaacgatggaaccaatggcaccaatggttcaactgtgattggtaaagatggtatttcggttaaagatggttcaggcaataccattgcaggtgtagataacacagcgttgacagttaaagatggcagtggcaacacagaaaccagcattaaccaagcgatcaacacgttaaatgcagcgcaaggtgaaactgataagtttgcagtgaagtacgacaaaaatgctgatggcagtgtgaactacaacaacatcacattggcaggtacgactgcaagcagtacacaagatgcaactacaggcaagatcaccacaacaggtggaacaagcttgaacaatgttgcaagtgcgggtgactacaaagatgttgccaatgcaagcaaaggtgtaaacgcaggtgacttaaacaatgcagttgttgatgcaaccaatgcagcaaccagcaaaggctttgcattacaagcagcagatggcgctaaagttcagaagaacctaggcgaagcagttgaagttgtcggtgccgacagcaacatcaccacaaaagttgcaggcggtcaggttgcaattgagttaaataaaaacctcaacaacttaactggcattaccgtgaacgatggaaccaatggcaccaatggttcaactgtgattggtaaagatggtatttcagttaaagacggttcaggcaataccattgcaggtgtagataacacagcgttgacagttaaagatggcagtggcaacacagaaaccagcattaaccaagcgatcaacacgttaaatgcagcgcaaggtgaaactgataagtttgcagtgaagtacgacaaaaatacggatggtagtaccaactacaacagtattactgcaggcaatggtaacggtactgcagcaacgatcggaactgacacagcaggtaatagtgttgtgaccagtggcggaactaaaattagtaatgttgcgaatggtgtcaatgcaagtgatgcagtaaacaaaggtcaattggatagcttaagtacaggtcttaccaatacaggctttggtttaaaagcagcagatggcaacaccgttaacaaaaaattaggcgaagcagtagacgttgtcggtgctgacagcaacatcaccacgaaagttgcaggcggtcaggttgcgattgagttaaataaaaacctcaacaacttaactggcattaccgtgaacgatggaaccaatggcaccaatggttcaactgtgattggtaaagatggtatttcgattaaagatggttcaggcaataccattgcaggtgtagataacacagcgttgacagttaaagatggcagtggcaacacagaaaccagcattaaccaagcgatcaacacgttaaatgcagcgcaaggtgaaactgacaagtttgcagtgaagtacgacaagaatgctgatggcagtgcaaactacaacaacatcacattggcaggtacgactgcaagtagcacgcaagatgcaacaacaggcaagatcaccacaacaggtggaacaagcttgaacaacgttgcaagtgcaggtgactacaaagatgttgccaatgcaagcaaaggtgtaaacgcaggtgacttgaacaatgcagttgttgatgcaaccaatgcagcaaccagcaaaggctttgcattacaagcagcagatggcgctaaagttcagaagaacctaggcgaagcagttgaagttgtcggtgcggacagcaacatcaccacaaaagtagtgggtggacaagttgcgattgagttaaataaaaacctcaacaacttaactggcattaccgtgaacgatggaaccaatggcacaaatggttcaactgtgattggtaaagatggtatttcggttaaagatggttcaggtaataccattgcaggtgtagataacacagcgttgacagttaaagatggcagtggcaacacagaaaccagcattaaccaagcgatcaacacgttaaatgcagcgcaaggtgaaactgataagtttgcagtgaagtacgacaaaaatgctgatggcagtgtgaactacaacaacatcacattggcaggtacgactgcaagcagtacacaagatgcaactacaggcaagatcaccacaacaggtggaacaagcttgaacaatgttgcaagtgcgggtgactacaaagatgttgccaatgcaagcaaaggtgtaaacgcaggtgacttaaacaatgcagttgttgatgcaaccaatgcagcaaccagcaaaggctttgcattacaagcagcagatggcgctaaagttcagaagaacctaggcgaagcagttgaagttgtcggtgccgacagcaacatcaccacaaaagttgcaggcggtcaggttgcaattgagttaaataaaaacctcaacaacttaactggcattaccgtgaacgatggaaccaatggcaccaatggttcaactgtgattggtaaagatggtatttcagttaaagacggttcaggcaataccattgcaggtgtagataacacagcgttgacagttaaagatggcagtggcaacacagaaaccagcattaaccaagcgatcaacacgttaaatgcagcgcaaggtgaaactgataagtttgcagtgaagtacgacaaaaatgctgatggcagtgtgaactacaacaacatcacattggcaggtacgactgcaagcagtacacaagatgcaactacaggcaagatcaccacaacaggtggtacaagcttgaacaatgttgcaagtgcgggtgactacaaagatgttgccaatgcaagcaaaggtgtaaacgcaggtgacttgaacaatgcagttgttgatgcaaccaatgcagcgaccagcaaaggctttgcattacaagcagcagatggcgctaaagttcagaagaacctaggcgaagcagttgaagttgttggtgcggacagtaacatcaccacgaaagttgcaggcggtcaggttgcaattgagttaaataaaaacctcaacaacttaactggcattaccgtgaacgatggaaccaatggcaccaatggttcaactgtgattggtaaagatggtatttcggttaaagatggttcaggcaataccattgcaggtgtagataacacagcgttgacagttaaagatggcagtggcaacacagaaaccagcattaaccaagcgatcaacacgttaaatgcagcgcaaggtgaaactgataagtttgcagtgaagtacgacaaaaatgctgatggcagtgcaaactataacaatgtcactttagctggtacaaatggcacaataatcagcaatgttaaagcgggtgctgtgacctcaacatctactgatgcgatcaatggtagccaattatatggtgttgcaaacagcgtgaagaatgcaattggtggttcaaccacaattgatgcaacgactggtgcaatcacgacgaccaatattggtggtacaggttcaaatacgattgatggtgcaatcagcagtattaaagattcagcgactaaagcgaaaaccacggtaagtgctggggataatgttgtcgttacatcgggtaccaatgcagatggctcaacaaactatgaagttgcgacagcgaaagacgttaactttgacaaagtgactgtaggtagtgttgttgtagataaatcaagcaatacaatcaaaggattaagtaataccacttggaacggaacagcagtatcaggtcaagcggcgacagaagaccagttaaaaacggtcagcgatgcgcaaggtgaaactgataagtttgcagtgaagtacgacaaaaatgctgatggcagtgcgaactacaacagtattactgcaggcaatggtaacggtactgcagcaacgatcggaactgacacagcaggtaatagtgttgtgaccagtggcggaactaaaattagtaatgttgcgaatggtgtcaatgcaagtgatgcagtaaacaaaggtcaattggatagcttaagtacaggtcttaccaatacaggctttggtttaaaagcagcagatggcaacaccgttaacaaaaaattaggcgaagcagtagacgttgtcggtgctgacagcaacatcaccacgaaagttgcaggcggtcaggttgcgattgagttaaataaaaacctcaacaacttaactggcattaccgtgaacgatggaaccaatggcaccaatggttcaactgtgattggtaaagatggtatttcgattaaagatggttcaggcaataccattgcaggtgtagataacacagcgttgacggttaaagatagcagtggcaacacagaaaccagcattaaccaagcgatcaacacgttaaatgcagcgcaaggtgaaactgataagtttgcagtgaagtacgataagaatgctgatggcagtgtgaactataacaatgtcactttagcaggtacaaatggcacaataatcagaaatgttaaagcgggtgctgtgacctcaacatctactgatgcgatcaatggtagccaattatacgatattgcaaacagcgtgaagaatgcaattggtggttcaaccacaagagatgtaacgactggtgcaatcacaacgaccaatattggtggtacaggttcaaacacgattgatggtgcaatcagcagtattaaagattcagcgactaaagcgaaaaccacgataagtgctggggataatgttgtcgttacatcgggtaccaatgcagatggctcaacaaactatgaagttgcgacagcgaaagacgttaactttgacaaagtaactgtaggtaatgttgttgttgataaggcaaatgacacgatccaaggtttgagcaataaagatctaaattcaactgattttgcgaccaaaggtagagctgcgactgaagaacagttaaaagcagtgattaccagtaatatcacggaagttgtggatggtaatggcaacaaggtgaatattattgaccaagttgtaaataccaaacctgacaataagaaccaagattcattgttcttaacgtatgacaaacaaggtcaagaaaccacagatcgcctaacgattggtcaaacggtacagaagatgaatactgatggtattaaattcttccataccaatgccgatacatcaaaaggtgatttgggtacaacaaatgactcaagtgcaggtggtttaaactctacagcaattggtgtaaatgcgattgttgcgaatggtgcagatagttcagttgctttaggtcataacaccaaagtcaatggtaaacaatcaattgcaattggttctggtgcagaagctttaggcaatcaatcgatcagtattggtacaggcaataaagtcactggtgatcattcgggtgcgattggtgatccaactattgtaaatggtgcaaacagctactctgtgggtaataacaaccaagtacttacagatgacactttcgtacttggaaacaatgtcaccaaaactattgctggttcagtagtattgggtaacggttcagctgcaacgacaggtgctggtgaggcaggctatgccttatctgtagcaacaaatgcagataaagccgcgatcactaaaactacgtcaagcactggtgctgttgcagttggtgatgcgtcgagcggtatttatcgtcaaattaccggtgttgctgcgggtagcgtagattcagatgctgtgaacgttgcacagttaaaagcggtgggtaaccaagttgtaacgactcaaactacattggtgaacagtttgggtggtaacgctaaagtaaatgcagacggtacgattacaggaccaacttataatgttgctcaaggtaatcagaccaatgttggtgatgcattaactgcgcttgataacgcaattaatactgcggcaacaacatctaaatcgactgtttctaatggtcagaatattgttgtcagcaagagcaaaaatgcagatggttcagacaactatgaagtatcaacagcaaaagacttgacagttgattctgtcaaagcgggtgatacggttctgaataatgcaggtattacaattggcaataacgcagttgtattgaacaacactggattaaccattagtggtggaccaagtgttaccttggcaggcatcgatgcaggcaataaaaccattcaaaatgttgcgaatgcagtaaatgcaacagatgcagtcaacaaagggcaattggacagcgcaattaacaatgtgaataacaatgtaaatgagcttgccaacaacgctgttaaatatgacgatgcatcaaaagataagatcacacttggtggtggggcaactggtacaacaatcaccaatgtgaaagatggtactgttgcgcaaggttctaaagatgctgtgaatggcggtcaattgtggaatgttcaacaacaagttgatcagaacacaactgatattagcaatatcaaaaatgatattaacaacggtactgttggtttggttcaacaagcaggtaaagatgcaccagtgacggttgcaaaagatactggcggtacaacggtgaatgtcgctggaacagatggcaaccgagtagtgacaggtgttaaggaaggtgcagtgaatgcaacatctaaagatgctgtcaatggtagtcaattgaatacaaccaaccaagcggtagtcaattatcttggtggtggggcaggttatgacaacattacaggtagcttcacagcgccaagttatacggtaggtgactcgaaatacaacaatgttggtggcgcaattgatgcattgaatcaagcagatcaagcattgaatagcaaaattgacaatgtcagtaacaagttggataacgcattccgtattaccaacaaccgtattgatgatgtagagaaaaaagccaatgctggtattgccgctgcgatggctctggaatcagcaccatatgtcccaggtaaatatacctatgcagcaggcgcagcttaccacggtggtgaaaatgcggtaggtgtgactttacgtaaaactgcagacaatggtcgttggtcgattacaggcggtgtagctgcagcgtctcaaggcgatgcaagtgttcgtatcggtatcagcggtgtgattgactaa

SEQ ID NO: 4 - protein, 3630 aa, Acinetobacter sp
MNKIYKVIWNATLLAWVAVSELAKGKTKSTTSKSKAKSLSSSVIVGGIILTTPLSLIAATVQVGGGTNSGTTATASTNCADLYNYQNPENSGSGAAGNYNAGNPSVCSIAIGENAQGGTSGTGGSPGIAIGGNSKATGGLSVAIGGYAQATNVGSIALGTAALSSGFNSLAISRQAAATNNYSIAIGTTSVSKGVGSIAMGHSTNASGDQSIAIGSSDAVNSATATTTYDGTTNTQASGSKSIAIGASAKASTNNSIALGAGSVTSAQSGNSYLTGVGASATNGVVSVGTSTATRRIQNVADGSAASDAVTVAQLDKAYDDTNGRLAAALGTGSGAAYNAANNTYTAPTNIGGTGKNTIDDAIKATQRSVVAGSNIVVTPTTASDGSISYSVATSATPTFTSITVNNAPTAGTDATNKTYVDSKAAASRTEVAAGSNVSGVVKTTGANGQDVYTVNANGTTASAGSSAVTVTPGTKDANNVTDYKVDLSATTKTDIQKGVDAKNAVDTAGLKFKGDTATTSNTKKLGDTVSITGDTNISTVATTDGVQVKLNPNLDLGATGSVKTGNTTINNAGVTADQVTVGGVVINNTSGINAGGKAITNVAAPTNNTDAANKKYVDDAGTALTNLGFGLKAQDGTTVNKKLGEAVDIVGSNSNISTKVNAGKVEVALSNTLDLGTTGSVTTGSTVINNAGVTATQVTANKVTINNAPTAGTDATNKTYVDSKAAASRTEVAAGSNVSGVVKTTGANGQDIYAVNANGTTASAGSSAVTVTPGTKDANNVTDYKVDLSATTKTDIQKGVDAKNAVDTAGLKFKGDTATTSNTKKLGDTVSITGDTNISTVATTDGVQVKLNPNLDLGATGSVKTGNTTINNAGVTADQVTVGGVVINNTSGINAGGKAITNVAAPTNNTDAANKKYVDDAGTALTNLGFGLKAQDGTTVNKKLGEAVDIVGSNSNISTKVNAGKVEVALSNTLDLGTTGSVTTGSTVINNAGVTATQVTANKVTVNNAPTAGTDATNKTYVDSKAAASRTEVAAGSNVSGVVKTTGANGQDVYTVNANGTTASAGSSAVTVTPGTKDANNVTDYKVDLSATTKTDIQKGVDAKNAVDTAGLKFKGDTATTSNTKKLGDTVSITGDTNISTVATTDGVQVKLNPNLDLGATGSVKTGNTTINNAGVTADQVTVGGVVINNTSGINAGGKAITNVAAPTNNTDAANKKYVDDAGTALTNLGFGLKAQDGTTVNKKLGEAVEVVGADSNITTKVAGGQVAIELNKNLNNLTGITVNDGTNGTNGSTVIGKDGISVKDGSGNTIAGVDNTALTVKDGSGNTETSINQAINTLNAAQGETDKFAVKYDKNADGSVNYNNITLAGTTASSTQDATTGKITTTGGTSLNNVASAGDYKDVANASKGVNAGDLNNAVVDATNAATSKGFALQAADGAKVQKNLGEAVEVVGADSNITTKVAGGQVAIELNKNLNNLTGITVNDGTNGTNGSTVIGKDGISVKDGSGNTIAGVDNTALTVKDGSGNTETSINQAINTLNAAQGETDKFAVKYDKNTDGSTNYNSITAGNGNGTAATIGTDTAGNSVVTSGGTKISNVANGVNASDAVNKGQLDSLSTGLTNTGFGLKAADGNTVNKKLGEAVDVVGADSNITTKVAGGQVAIELNKNLNNLTGITVNDGTNGTNGSTVIGKDGISIKDGSGNTIAGVDNTALTVKDGSGNTETSINQAINTLNAAQGETDKFAVKYDKNADGSANYNNITLAGTTASSTQDATTGKITTTGGTSLNNVASAGDYKDVANASKGVNAGDLNNAVVDATNAATSKGFALQAADGAKVQKNLGEAVEVVGADSNITTKVVGGQVAIELNKNLNNLTGITVNDGTNGTNGSTVIGKDGISVKDGSGNTIAGVDNTALTVKDGSGNTETSINQAINTLNAAQGETDKFAVKYDKNADGSVNYNNITLAGTTASSTQDATTGKITTTGGTSLNNVASAGDYKDVANASKGVNAGDLNNAVVDATNAATSKGFALQAADGAKVQKNLGEAVEVVGADSNITTKVAGGQVAIELNKNLNNLTGITVNDGTNGTNGSTVIGKDGISVKDGSGNTIAGVDNTALTVKDGSGNTETSINQAINTLNAAQGETDKFAVKYDKNADGSVNYNNITLAGTTASSTQDATTGKITTTGGTSLNNVASAGDYKDVANASKGVNAGDLNNAVVDATNAATSKGFALQAADGAKVQKNLGEAVEVVGADSNITTKVAGGQVAIELNKNLNNLTGITVNDGTNGTNGSTVIGKDGISVKDGSGNTIAGVDNTALTVKDGSGNTETSINQAINTLNAAQGETDKFAVKYDKNADGSANYNNVTLAGTNGTIISNVKAGAVTSTSTDAINGSQLYGVANSVKNAIGGSTTIDATTGAITTTNIGGTGSNTIDGAISSIKDSATKAKTTVSAGDNVVVTSGTNADGSTNYEVATAKDVNFDKVTVGSVVVDKSSNTIKGLSNTTWNGTAVSGQAATEDQLKTVSDAQGETDKFAVKYDKNADGSANYNSITAGNGNGTAATIGTDTAGNSVVTSGGTKISNVANGVNASDAVNKGQLDSLSTGLTNTGFGLKAADGNTVNKKLGEAVDVVGADSNITTKVAGGQVAIELNKNLNNLTGITVNDGTNGTNGSTVIGKDGISIKDGSGNTIAGVDNTALTVKDSSGNTETSINQAINTLNAAQGETDKFAVKYDKNADGSVNYNNVTLAGTNGTIIRNVKAGAVTSTSTDAINGSQLYDIANSVKNAIGGSTTRDVTTGAITTTNIGGTGSNTIDGAISSIKDSATKAKTTISAGDNVVVTSGTNADGSTNYEVATAKDVNFDKVTVGNVVVDKANDTIQGLSNKDLNSTDFATKGRAATEEQLKAVITSNITEVVDGNGNKVNIIDQVVNTKPDNKNQDSLFLTYDKQGQETTDRLTIGQTVQKMNTDGIKFFHTNADTSKGDLGTTNDSSAGGLNSTAIGVNAIVANGADSSVALGHNTKVNGKQSIAIGSGAEALGNQSISIGTGNKVTGDHSGAIGDPTIVNGANSYSVGNNNQVLTDDTFVLGNNVTKTIAGSVVLGNGSAATTGAGEAGYALSVATNADKAAITKTTSSTGAVAVGDASSGIYRQITGVAAGSVDSDAVNVAQLKAVGNQVVTTQTTLVNSLGGNAKVNADGTITGPTYNVAQGNQTNVGDALTALDNAINTAATTSKSTVSNGQNIVVSKSKNADGSDNYEVSTAKDLTVDSVKAGDTVLNNAGITIGNNAVVLNNTGLTISGGPSVTLAGIDAGNKTIQNVANAVNATDAVNKGQLDSAINNVNNNVNELANNAVKYDDASKDKITLGGGATGTTITNVKDGTVAQGSKDAVNGGQLWNVQQQVDQNTTDISNIKNDINNGTVGLVQQAGKDAPVTVAKDTGGTTVNVAGTDGNRVVTGVKEGAVNATSKDAVNGSQLNTTNQAVVNYLGGGAGYDNITGSFTAPSYTVGDSKYNNVGGAIDALNQADQALNSKIDNVSNKLDNAFRITNNRIDDVEKKANAGIAAAMALESAPYVPGKYTYAAGAAYHGGENAVGVTLRKTADNGRWSITGGVAAASQGDASVRIGISGVID

SEQ ID NO: 5 - DNA, 26 bp, artificial sequence
  Primer Sequence
gaattcatctcctaaggaaaagcgat

SEQ ID NO: 6 - DNA, 10131 bp, artificial sequence
  AtaA lacking Nhead
  CDS (1)..(10131)
atgaataaaatctacaaagtgatttggaatgcgactttgttggcatgggttgcagtatctgaattggcaaaagggaaaaccaaatctacgacatcaaaatccaaagctaaatcattatcttcatctgtaatagttggtgggataatattaacaacacctttatctttaatagcagctcagttggataaagcttatgatgatacaaatggtcgtttagctgctgctttaggtacaggtagtggtgctgcctataatgcagcaaacaatacatataccgctccaacgaatattgggggaacaggtaaaaatacgattgatgatgcaattaaagcaactcaacgaagtgtagtcgctggatcaaatattgtcgttaccccgacgacagcttctgatggttcaatatcgtattcggttgctacaagcgcaacaccgacgtttacaagtataactgtaaacaatgcaccaacggcaggtacagatgcgaccaacaagacttatgtagactcaaaagcagcagcatcgagaacagaagtagcagctggaagcaatgtatctggtgtagtaaaaacgacaggcgcaaacggtcaagacgtttatacagtaaatgccaatggtacgactgcatcagcaggttcttcagcagttaccgtaacaccaggcacgaaagatgcaaataatgtcactgactataaagtagacttatcagcgactacaaaaaccgatatccaaaaaggtgtagatgcaaaaaatgctgtagataccgcaggtctaaaatttaaaggtgatacagcaaccacaagcaataccaagaaattaggtgacaccgtttcgattacgggtgatacgaacattagtacagttgcgacaacagatggtgtacaggttaagttaaatccaaacttggatttaggagcaactggtagcgttaaaacgggtaataccacgattaacaatgcaggtgtaacagctgatcaagttacggttggtggtgttgttattaacaacacatcaggtattaatgctggtggtaaagcgattactaatgtagcagcaccaacaaataacacagatgctgctaacaagaagtatgtagatgatgcaggtacagcattaaccaatttgggctttggattaaaagcacaagatggtacgactgtgaacaagaaattaggtgaagcagttgatattgttggttcaaacagcaacatcagtacaaaagtaaatgcaggcaaagtagaagttgcactatccaatacattggacttaggtactacaggtagcgttactacgggttcaactgtaattaacaatgctggtgttacggcaactcaagttaccgcaaacaaagtcacaataaacaatgcaccaacagcaggtacagatgcgaccaacaagacttatgtagactcaaaagcagcagcatcaagaacagaagtcgcagctggaagcaatgtatctggtgtagtaaaaacgacaggcgcaaacggtcaagatatttatgcagtaaatgccaatggtacgactgcatcagcaggttcttcagcagttaccgtaacaccaggcacgaaagatgcaaataatgtcactgactataaagtagacttgtcagcgactacaaaaaccgatattcaaaaaggtgtagatgcaaaaaatgctgtagatactgcaggtctaaaatttaaaggtgatacagcaaccacaagcaataccaagaaattaggtgacaccgtttcgattacgggtgatacgaacattagtacagttgcaacaactgatggtgtacaggttaagttaaatccaaacttagatttaggagcaactggtagcgttaaaacgggtaataccacgattaacaatgcaggtgtaacagctgaccaagttacggttggtggtgttgttattaacaacacatcaggtattaatgctggtggtaaagcgattaccaatgtagcagcaccaacaaataacacagatgctgctaacaagaagtatgtagatgacgcaggtacagcattaaccaatttgggctttggattaaaagcgcaagatggtacgactgtgaacaagaaattaggtgaagcagttgatattgttggttcaaacagcaacatcagtacaaaagtaaatgcaggcaaagtagaagttgcactatccaatacattggacttaggtactacaggtagcgttactacgggttcaactgtaattaacaatgctggtgttacggcaactcaagttaccgcaaacaaagtcacagttaataatgcaccaacagcaggtacagatgcgaccaataaaacttatgtagactcaaaagcagcggcatcaagaacagaagtcgcagctggaagcaatgtatctggcgtagtaaaaacgacaggtgcaaacggtcaagacgtttatacagtaaatgccaatggtacgactgcatcagcaggttcttcagcagttaccgtaacaccaggcacgaaagatgcaaataatgtcactgactataaagtagacttgtcagcgactacaaaaaccgatattcaaaaaggtgtagatgcaaaaaatgctgtagataccgcaggtctaaaatttaaaggtgatacagcaaccacaagcaataccaagaaattaggtgacaccgtttcgattacgggtgatacgaacattagtacagttgcgacaactgatggtgtacaggttaagctaaatccaaacttggatttaggagcaactggtagcgttaaaacgggtaataccacgattaacaatgcaggtgtaacagctgatcaagttacagttggtggtgttgttattaacaacacatcaggtattaatgctggtggtaaagcgattaccaatgtagcagcaccaacaaataacacagatgctgctaacaagaagtatgtagatgatgcaggtacagcattaaccaatttgggctttggattaaaagcgcaagatggtacgactgtgaacaagaaattaggcgaagcagttgaagttgttggtgcggacagtaacatcaccacgaaagttgcaggcggtcaggttgcaattgagttaaataaaaacctcaacaacttaactggcattaccgtgaacgatggaaccaatggcaccaatggttcaactgtgattggtaaagatggtatttcggttaaagatggttcaggcaataccattgcaggtgtagataacacagcgttgacagttaaagatggcagtggcaacacagaaaccagcattaaccaagcgatcaacacgttaaatgcagcgcaaggtgaaactgataagtttgcagtgaagtacgacaaaaatgctgatggcagtgtgaactacaacaacatcacattggcaggtacgactgcaagcagtacacaagatgcaactacaggcaagatcaccacaacaggtggaacaagcttgaacaatgttgcaagtgcgggtgactacaaagatgttgccaatgcaagcaaaggtgtaaacgcaggtgacttaaacaatgcagttgttgatgcaaccaatgcagcaaccagcaaaggctttgcattacaagcagcagatggcgctaaagttcagaagaacctaggcgaagcagttgaagttgtcggtgccgacagcaacatcaccacaaaagttgcaggcggtcaggttgcaattgagttaaataaaaacctcaacaacttaactggcattaccgtgaacgatggaaccaatggcaccaatggttcaactgtgattggtaaagatggtatttcagttaaagacggttcaggcaataccattgcaggtgtagataacacagcgttgacagttaaagatggcagtggcaacacagaaaccagcattaaccaagcgatcaacacgttaaatgcagcgcaaggtgaaactgataagtttgcagtgaagtacgacaaaaatacggatggtagtaccaactacaacagtattactgcaggcaatggtaacggtactgcagcaacgatcggaactgacacagcaggtaatagtgttgtgaccagtggcggaactaaaattagtaatgttgcgaatggtgtcaatgcaagtgatgcagtaaacaaaggtcaattggatagcttaagtacaggtcttaccaatacaggctttggtttaaaagcagcagatggcaacaccgttaacaaaaaattaggcgaagcagtagacgttgtcggtgctgacagcaacatcaccacgaaagttgcaggcggtcaggttgcgattgagttaaataaaaacctcaacaacttaactggcattaccgtgaacgatggaaccaatggcaccaatggttcaactgtgattggtaaagatggtatttcgattaaagatggttcaggcaataccattgcaggtgtagataacacagcgttgacagttaaagatggcagtggcaacacagaaaccagcattaaccaagcgatcaacacgttaaatgcagcgcaaggtgaaactgacaagtttgcagtgaagtacgacaagaatgctgatggcagtgcaaactacaacaacatcacattggcaggtacgactgcaagtagcacgcaagatgcaacaacaggcaagatcaccacaacaggtggaacaagcttgaacaacgttgcaagtgcaggtgactacaaagatgttgccaatgcaagcaaaggtgtaaacgcaggtgacttgaacaatgcagttgttgatgcaaccaatgcagcaaccagcaaaggctttgcattacaagcagcagatggcgctaaagttcagaagaacctaggcgaagcagttgaagttgtcggtgcggacagcaacatcaccacaaaagtagtgggtggacaagttgcgattgagttaaataaaaacctcaacaacttaactggcattaccgtgaacgatggaaccaatggcacaaatggttcaactgtgattggtaaagatggtatttcggttaaagatggttcaggtaataccattgcaggtgtagataacacagcgttgacagttaaagatggcagtggcaacacagaaaccagcattaaccaagcgatcaacacgttaaatgcagcgcaaggtgaaactgataagtttgcagtgaagtacgacaaaaatgctgatggcagtgtgaactacaacaacatcacattggcaggtacgactgcaagcagtacacaagatgcaactacaggcaagatcaccacaacaggtggaacaagcttgaacaatgttgcaagtgcgggtgactacaaagatgttgccaatgcaagcaaaggtgtaaacgcaggtgacttaaacaatgcagttgttgatgcaaccaatgcagcaaccagcaaaggctttgcattacaagcagcagatggcgctaaagttcagaagaacctaggcgaagcagttgaagttgtcggtgccgacagcaacatcaccacaaaagttgcaggcggtcaggttgcaattgagttaaataaaaacctcaacaacttaactggcattaccgtgaacgatggaaccaatggcaccaatggttcaactgtgattggtaaagatggtatttcagttaaagacggttcaggcaataccattgcaggtgtagataacacagcgttgacagttaaagatggcagtggcaacacagaaaccagcattaaccaagcgatcaacacgttaaatgcagcgcaaggtgaaactgataagtttgcagtgaagtacgacaaaaatgctgatggcagtgtgaactacaacaacatcacattggcaggtacgactgcaagcagtacacaagatgcaactacaggcaagatcaccacaacaggtggtacaagcttgaacaatgttgcaagtgcgggtgactacaaagatgttgccaatgcaagcaaaggtgtaaacgcaggtgacttgaacaatgcagttgttgatgcaaccaatgcagcgaccagcaaaggctttgcattacaagcagcagatggcgctaaagttcagaagaacctaggcgaagcagttgaagttgttggtgcggacagtaacatcaccacgaaagttgcaggcggtcaggttgcaattgagttaaataaaaacctcaacaacttaactggcattaccgtgaacgatggaaccaatggcaccaatggttcaactgtgattggtaaagatggtatttcggttaaagatggttcaggcaataccattgcaggtgtagataacacagcgttgacagttaaagatggcagtggcaacacagaaaccagcattaaccaagcgatcaacacgttaaatgcagcgcaaggtgaaactgataagtttgcagtgaagtacgacaaaaatgctgatggcagtgcaaactataacaatgtcactttagctggtacaaatggcacaataatcagcaatgttaaagcgggtgctgtgacctcaacatctactgatgcgatcaatggtagccaattatatggtgttgcaaacagcgtgaagaatgcaattggtggttcaaccacaattgatgcaacgactggtgcaatcacgacgaccaatattggtggtacaggttcaaatacgattgatggtgcaatcagcagtattaaagattcagcgactaaagcgaaaaccacggtaagtgctggggataatgttgtcgttacatcgggtaccaatgcagatggctcaacaaactatgaagttgcgacagcgaaagacgttaactttgacaaagtgactgtaggtagtgttgttgtagataaatcaagcaatacaatcaaaggattaagtaataccacttggaacggaacagcagtatcaggtcaagcggcgacagaagaccagttaaaaacggtcagcgatgcgcaaggtgaaactgataagtttgcagtgaagtacgacaaaaatgctgatggcagtgcgaactacaacagtattactgcaggcaatggtaacggtactgcagcaacgatcggaactgacacagcaggtaatagtgttgtgaccagtggcggaactaaaattagtaatgttgcgaatggtgtcaatgcaagtgatgcagtaaacaaaggtcaattggatagcttaagtacaggtcttaccaatacaggctttggtttaaaagcagcagatggcaacaccgttaacaaaaaattaggcgaagcagtagacgttgtcggtgctgacagcaacatcaccacgaaagttgcaggcggtcaggttgcgattgagttaaataaaaacctcaacaacttaactggcattaccgtgaacgatggaaccaatggcaccaatggttcaactgtgattggtaaagatggtatttcgattaaagatggttcaggcaataccattgcaggtgtagataacacagcgttgacggttaaagatagcagtggcaacacagaaaccagcattaaccaagcgatcaacacgttaaatgcagcgcaaggtgaaactgataagtttgcagtgaagtacgataagaatgctgatggcagtgtgaactataacaatgtcactttagcaggtacaaatggcacaataatcagaaatgttaaagcgggtgctgtgacctcaacatctactgatgcgatcaatggtagccaattatacgatattgcaaacagcgtgaagaatgcaattggtggttcaaccacaagagatgtaacgactggtgcaatcacaacgaccaatattggtggtacaggttcaaacacgattgatggtgcaatcagcagtattaaagattcagcgactaaagcgaaaaccacgataagtgctggggataatgttgtcgttacatcgggtaccaatgcagatggctcaacaaactatgaagttgcgacagcgaaagacgttaactttgacaaagtaactgtaggtaatgttgttgttgataaggcaaatgacacgatccaaggtttgagcaataaagatctaaattcaactgattttgcgaccaaaggtagagctgcgactgaagaacagttaaaagcagtgattaccagtaatatcacggaagttgtggatggtaatggcaacaaggtgaatattattgaccaagttgtaaataccaaacctgacaataagaaccaagattcattgttcttaacgtatgacaaacaaggtcaagaaaccacagatcgcctaacgattggtcaaacggtacagaagatgaatactgatggtattaaattcttccataccaatgccgatacatcaaaaggtgatttgggtacaacaaatgactcaagtgcaggtggtttaaactctacagcaattggtgtaaatgcgattgttgcgaatggtgcagatagttcagttgctttaggtcataacaccaaagtcaatggtaaacaatcaattgcaattggttctggtgcagaagctttaggcaatcaatcgatcagtattggtacaggcaataaagtcactggtgatcattcgggtgcgattggtgatccaactattgtaaatggtgcaaacagctactctgtgggtaataacaaccaagtacttacagatgacactttcgtacttggaaacaatgtcaccaaaactattgctggttcagtagtattgggtaacggttcagctgcaacgacaggtgctggtgaggcaggctatgccttatctgtagcaacaaatgcagataaagccgcgatcactaaaactacgtcaagcactggtgctgttgcagttggtgatgcgtcgagcggtatttatcgtcaaattaccggtgttgctgcgggtagcgtagattcagatgctgtgaacgttgcacagttaaaagcggtgggtaaccaagttgtaacgactcaaactacattggtgaacagtttgggtggtaacgctaaagtaaatgcagacggtacgattacaggaccaacttataatgttgctcaaggtaatcagaccaatgttggtgatgcattaactgcgcttgataacgcaattaatactgcggcaacaacatctaaatcgactgtttctaatggtcagaatattgttgtcagcaagagcaaaaatgcagatggttcagacaactatgaagtatcaacagcaaaagacttgacagttgattctgtcaaagcgggtgatacggttctgaataatgcaggtattacaattggcaataacgcagttgtattgaacaacactggattaaccattagtggtggaccaagtgttaccttggcaggcatcgatgcaggcaataaaaccattcaaaatgttgcgaatgcagtaaatgcaacagatgcagtcaacaaagggcaattggacagcgcaattaacaatgtgaataacaatgtaaatgagcttgccaacaacgctgttaaatatgacgatgcatcaaaagataagatcacacttggtggtggggcaactggtacaacaatcaccaatgtgaaagatggtactgttgcgcaaggttctaaagatgctgtgaatggcggtcaattgtggaatgttcaacaacaagttgatcagaacacaactgatattagcaatatcaaaaatgatattaacaacggtactgttggtttggttcaacaagcaggtaaagatgcaccagtgacggttgcaaaagatactggcggtacaacggtgaatgtcgctggaacagatggcaaccgagtagtgacaggtgttaaggaaggtgcagtgaatgcaacatctaaagatgctgtcaatggtagtcaattgaatacaaccaaccaagcggtagtcaattatcttggtggtggggcaggttatgacaacattacaggtagcttcacagcgccaagttatacggtaggtgactcgaaatacaacaatgttggtggcgcaattgatgcattgaatcaagcagatcaagcattgaatagcaaaattgacaatgtcagtaacaagttggataacgcattccgtattaccaacaaccgtattgatgatgtagagaaaaaagccaatgctggtattgccgctgcgatggctctggaatcagcaccatatgtcccaggtaaatatacctatgcagcaggcgcagcttaccacggtggtgaaaatgcggtaggtgtgactttacgtaaaactgcagacaatggtcgttggtcgattacaggcggtgtagctgcagcgtctcaaggcgatgcaagtgttcgtatcggtatcagcggtgtgattgactaa

SEQ ID NO: 7 - protein, 3376 aa, artificial sequence
  Synthetic Construct
MNKIYKVIWNATLLAWVAVSELAKGKTKSTTSKSKAKSLSSSVIVGGIILTTPLSLIAAQLDKAYDDTNGRLAAALGTGSGAAYNAANNTYTAPTNIGGTGKNTIDDAIKATQRSVVAGSNIVVTPTTASDGSISYSVATSATPTFTSITVNNAPTAGTDATNKTYVDSKAAASRTEVAAGSNVSGVVKTTGANGQDVYTVNANGTTASAGSSAVTVTPGTKDANNVTDYKVDLSATTKTDIQKGVDAKNAVDTAGLKFKGDTATTSNTKKLGDTVSITGDTNISTVATTDGVQVKLNPNLDLGATGSVKTGNTTINNAGVTADQVTVGGVVINNTSGINAGGKAITNVAAPTNNTDAANKKYVDDAGTALTNLGFGLKAQDGTTVNKKLGEAVDIVGSNSNISTKVNAGKVEVALSNTLDLGTTGSVTTGSTVINNAGVTATQVTANKVTINNAPTAGTDATNKTYVDSKAAASRTEVAAGSNVSGVVKTTGANGQDIYAVNANGTTASAGSSAVTVTPGTKDANNVTDYKVDLSATTKTDIQKGVDAKNAVDTAGLKFKGDTATTSNTKKLGDTVSITGDTNISTVATTDGVQVKLNPNLDLGATGSVKTGNTTINNAGVTADQVTVGGVVINNTSGINAGGKAITNVAAPTNNTDAANKKYVDDAGTALTNLGFGLKAQDGTTVNKKLGEAVDIVGSNSNISTKVNAGKVEVALSNTLDLGTTGSVTTGSTVINNAGVTATQVTANKVTVNNAPTAGTDATNKTYVDSKAAASRTEVAAGSNVSGVVKTTGANGQDVYTVNANGTTASAGSSAVTVTPGTKDANNVTDYKVDLSATTKTDIQKGVDAKNAVDTAGLKFKGDTATTSNTKKLGDTVSITGDTNISTVATTDGVQVKLNPNLDLGATGSVKTGNTTINNAGVTADQVTVGGVVINNTSGINAGGKAITNVAAPTNNTDAANKKYVDDAGTALTNLGFGLKAQDGTTVNKKLGEAVEVVGADSNITTKVAGGQVAIELNKNLNNLTGITVNDGTNGTNGSTVIGKDGISVKDGSGNTIAGVDNTALTVKDGSGNTETSINQAINTLNAAQGETDKFAVKYDKNADGSVNYNNITLAGTTASSTQDATTGKITTTGGTSLNNVASAGDYKDVANASKGVNAGDLNNAVVDATNAATSKGFALQAADGAKVQKNLGEAVEVVGADSNITTKVAGGQVAIELNKNLNNLTGITVNDGTNGTNGSTVIGKDGISVKDGSGNTIAGVDNTALTVKDGSGNTETSINQAINTLNAAQGETDKFAVKYDKNTDGSTNYNSITAGNGNGTAATIGTDTAGNSVVTSGGTKISNVANGVNASDAVNKGQLDSLSTGLTNTGFGLKAADGNTVNKKLGEAVDVVGADSNITTKVAGGQVAIELNKNLNNLTGITVNDGTNGTNGSTVIGKDGISIKDGSGNTIAGVDNTALTVKDGSGNTETSINQAINTLNAAQGETDKFAVKYDKNADGSANYNNITLAGTTASSTQDATTGKITTTGGTSLNNVASAGDYKDVANASKGVNAGDLNNAVVDATNAATSKGFALQAADGAKVQKNLGEAVEVVGADSNITTKVVGGQVAIELNKNLNNLTGITVNDGTNGTNGSTVIGKDGISVKDGSGNTIAGVDNTALTVKDGSGNTETSINQAINTLNAAQGETDKFAVKYDKNADGSVNYNNITLAGTTASSTQDATTGKITTTGGTSLNNVASAGDYKDVANASKGVNAGDLNNAVVDATNAATSKGFALQAADGAKVQKNLGEAVEVVGADSNITTKVAGGQVAIELNKNLNNLTGITVNDGTNGTNGSTVIGKDGISVKDGSGNTIAGVDNTALTVKDGSGNTETSINQAINTLNAAQGETDKFAVKYDKNADGSVNYNNITLAGTTASSTQDATTGKITTTGGTSLNNVASAGDYKDVANASKGVNAGDLNNAVVDATNAATSKGFALQAADGAKVQKNLGEAVEVVGADSNITTKVAGGQVAIELNKNLNNLTGITVNDGTNGTNGSTVIGKDGISVKDGSGNTIAGVDNTALTVKDGSGNTETSINQAINTLNAAQGETDKFAVKYDKNADGSANYNNVTLAGTNGTIISNVKAGAVTSTSTDAINGSQLYGVANSVKNAIGGSTTIDATTGAITTTNIGGTGSNTIDGAISSIKDSATKAKTTVSAGDNVVVTSGTNADGSTNYEVATAKDVNFDKVTVGSVVVDKSSNTIKGLSNTTWNGTAVSGQAATEDQLKTVSDAQGETDKFAVKYDKNADGSANYNSITAGNGNGTAATIGTDTAGNSVVTSGGTKISNVANGVNASDAVNKGQLDSLSTGLTNTGFGLKAADGNTVNKKLGEAVDVVGADSNITTKVAGGQVAIELNKNLNNLTGITVNDGTNGTNGSTVIGKDGISIKDGSGNTIAGVDNTALTVKDSSGNTETSINQAINTLNAAQGETDKFAVKYDKNADGSVNYNNVTLAGTNGTIIRNVKAGAVTSTSTDAINGSQLYDIANSVKNAIGGSTTRDVTTGAITTTNIGGTGSNTIDGAISSIKDSATKAKTTISAGDNVVVTSGTNADGSTNYEVATAKDVNFDKVTVGNVVVDKANDTIQGLSNKDLNSTDFATKGRAATEEQLKAVITSNITEVVDGNGNKVNIIDQVVNTKPDNKNQDSLFLTYDKQGQETTDRLTIGQTVQKMNTDGIKFFHTNADTSKGDLGTTNDSSAGGLNSTAIGVNAIVANGADSSVALGHNTKVNGKQSIAIGSGAEALGNQSISIGTGNKVTGDHSGAIGDPTIVNGANSYSVGNNNQVLTDDTFVLGNNVTKTIAGSVVLGNGSAATTGAGEAGYALSVATNADKAAITKTTSSTGAVAVGDASSGIYRQITGVAAGSVDSDAVNVAQLKAVGNQVVTTQTTLVNSLGGNAKVNADGTITGPTYNVAQGNQTNVGDALTALDNAINTAATTSKSTVSNGQNIVVSKSKNADGSDNYEVSTAKDLTVDSVKAGDTVLNNAGITIGNNAVVLNNTGLTISGGPSVTLAGIDAGNKTIQNVANAVNATDAVNKGQLDSAINNVNNNVNELANNAVKYDDASKDKITLGGGATGTTITNVKDGTVAQGSKDAVNGGQLWNVQQQVDQNTTDISNIKNDINNGTVGLVQQAGKDAPVTVAKDTGGTTVNVAGTDGNRVVTGVKEGAVNATSKDAVNGSQLNTTNQAVVNYLGGGAGYDNITGSFTAPSYTVGDSKYNNVGGAIDALNQADQALNSKIDNVSNKLDNAFRITNNRIDDVEKKANAGIAAAMALESAPYVPGKYTYAAGAAYHGGENAVGVTLRKTADNGRWSITGGVAAASQGDASVRIGISGVID

SEQ ID NO: 8 - DNA, 10353 bp, artificial sequence
  AtaA lacking a portion of Nstalk
  CDS (1)..(10353)
atgaataaaatctacaaagtgatttggaatgcgactttgttggcatgggttgcagtatctgaattggcaaaagggaaaaccaaatctacgacatcaaaatccaaagctaaatcattatcttcatctgtaatagttggtgggataatattaacaacacctttatctttaatagcagctactgttcaagttggagggggaactaattctggaacaactgctacagcttctacgaattgtgcagacttatataattatcaaaatcctgagaactcaggctctggagcggctgggaattataatgcaggaaatccaagtgtgtgttcgatcgctataggtgaaaacgcacaaggtggtacttctggaactggagggtcgccagggatagcgataggtggaaattctaaagctacgggtggtttatctgttgctataggcggatatgctcaagcgacaaatgttggaagtattgctttaggcacagcagctttatcaagtggttttaacagtttagcaatatccagacaagctgctgcaacgaataactattcaatagctataggtacaacttcagtttcgaaaggagttggatcgattgctatggggcattcaacgaatgcttctggagatcaatcgatagcaattggtagctcggatgctgttaattcagcaacagcaacaacaacatacgatggtacaacaaatactcaagcatcaggtagtaaatcgattgctataggtgcaagcgcaaaggcatcaaccaataacagcattgcactaggtgcaggatcggtaacttctgcacaatctggtaattcttatcttactggtgtaggtgcatcagctacaaatggtgttgtatctgttggaacttcaactgcaacacgtcgtatccaaaatgtagcagatggttcagccgcttcagatgctgtgacagttgctcagttggataaagcttatgatgatacaaatggtcgtttagataccgcaggtctaaaatttaaaggtgatacagcaaccacaagcaataccaagaaattaggtgacaccgtttcgattacgggtgatacgaacattagtacagttgcgacaacagatggtgtacaggttaagttaaatccaaacttggatttaggagcaactggtagcgttaaaacgggtaataccacgattaacaatgcaggtgtaacagctgatcaagttacggttggtggtgttgttattaacaacacatcaggtattaatgctggtggtaaagcgattactaatgtagcagcaccaacaaataacacagatgctgctaacaagaagtatgtagatgatgcaggtacagcattaaccaatttgggctttggattaaaagcacaagatggtacgactgtgaacaagaaattaggtgaagcagttgatattgttggttcaaacagcaacatcagtacaaaagtaaatgcaggcaaagtagaagttgcactatccaatacattggacttaggtactacaggtagcgttactacgggatctactgtaattaacaatgctggtgttacggcaactcaagttaccgcaaacaaagtcacaataaacaatgcaccaacagcaggtacagatgcgaccaacaagacttatgtagactcaaaagcagcagcatcaagaacagaagtcgcagctggaagcaatgtatctggtgtagtaaaaacgacaggcgcaaacggtcaagatatttatgcagtaaatgccaatggtacgactgcatcagcaggttcttcagcagttaccgtaacaccaggcacgaaagatgcaaataatgtcactgactataaagtagacttgtcagcgactacaaaaaccgatattcaaaaaggtgtagatgcaaaaaatgctgtagatactgcaggtctaaaatttaaaggtgatacagcaaccacaagcaataccaagaaattaggtgacaccgtttcgattacgggtgatacgaacattagtacagttgcaacaactgatggtgtacaggttaagttaaatccaaacttagatttaggagcaactggtagcgttaaaacgggtaataccacgattaacaatgcaggtgtaacagctgaccaagttacggttggtggtgttgttattaacaacacatcaggtattaatgctggtggtaaagcgattaccaatgtagcagcaccaacaaataacacagatgctgctaacaagaagtatgtagatgacgcaggtacagcattaaccaatttgggctttggattaaaagcgcaagatggtacgactgtgaacaagaaattaggtgaagcagttgatattgttggttcaaacagcaacatcagtacaaaagtaaatgcaggcaaagtagaagttgcactatccaatacattggacttaggtactacaggtagcgttactacgggttcaactgtaattaacaatgctggtgttacggcaactcaagttaccgcaaacaaagtcacagttaataatgcaccaacagcaggtacagatgcgaccaataaaacttatgtagactcaaaagcagcggcatcaagaacagaagtcgcagctggaagcaatgtatctggcgtagtaaaaacgacaggtgcaaacggtcaagacgtttatacagtaaatgccaatggtacgactgcatcagcaggttcttcagcagttaccgtaacaccaggcacgaaagatgcaaataatgtcactgactataaagtagacttgtcagcgactacaaaaaccgatattcaaaaaggtgtagatgcaaaaaatgctgtagataccgcaggtctaaaatttaaaggtgatacagcaaccacaagcaataccaagaaattaggtgacaccgtttcgattacgggtgatacgaacattagtacagttgcgacaactgatggtgtacaggttaagctaaatccaaacttggatttaggagcaactggtagcgttaaaacgggtaataccacgattaacaatgcaggtgtaacagctgatcaagttacagttggtggtgttgttattaacaacacatcaggtattaatgctggtggtaaagcgattaccaatgtagcagcaccaacaaataacacagatgctgctaacaagaagtatgtagatgatgcaggtacagcattaaccaatttgggctttggattaaaagcgcaagatggtacgactgtgaacaagaaattaggcgaagcagttgaagttgttggtgcggacagtaacatcaccacgaaagttgcaggcggtcaggttgcaattgagttaaataaaaacctcaacaacttaactggcattaccgtgaacgatggaaccaatggcaccaatggatctactgtgattggtaaagatggtatttcggttaaagatggttcaggcaataccattgcaggtgtagataacacagcgttgacagttaaagatggcagtggcaacacagaaaccagcattaaccaagcgatcaacacgttaaatgcagcgcaaggtgaaactgataagtttgcagtgaagtacgacaaaaatgctgatggcagtgtgaactacaacaacatcacattggcaggtacgactgcaagcagtacacaagatgcaactacaggcaagatcaccacaacaggtggaacaagcttgaacaatgttgcaagtgcgggtgactacaaagatgttgccaatgcaagcaaaggtgtaaacgcaggtgacttaaacaatgcagttgttgatgcaaccaatgcagcaaccagcaaaggctttgcattacaagcagcagatggcgctaaagttcagaagaacctaggcgaagcagttgaagttgtcggtgccgacagcaacatcaccacaaaagttgcaggcggtcaggttgcaattgagttaaataaaaacctcaacaacttaactggcattaccgtgaacgatggaaccaatggcaccaatggttcaactgtgattggtaaagatggtatttcagttaaagacggttcaggcaataccattgcaggtgtagataacacagcgttgacagttaaagatggcagtggcaacacagaaaccagcattaaccaagcgatcaacacgttaaatgcagcgcaaggtgaaactgataagtttgcagtgaagtacgacaaaaatacggatggtagtaccaactacaacagtattactgcaggcaatggtaacggtactgcagcaacgatcggaactgacacagcaggtaatagtgttgtgaccagtggcggaactaaaattagtaatgttgcgaatggtgtcaatgcaagtgatgcagtaaacaaaggtcaattggatagcttaagtacaggtcttaccaatacaggctttggtttaaaagcagcagatggcaacaccgttaacaaaaaattaggcgaagcagtagacgttgtcggtgctgacagcaacatcaccacgaaagttgcaggcggtcaggttgcgattgagttaaataaaaacctcaacaacttaactggcattaccgtgaacgatggaaccaatggcaccaatggttcaactgtgattggtaaagatggtatttcgattaaagatggttcaggcaataccattgcaggtgtagataacacagcgttgacagttaaagatggcagtggcaacacagaaaccagcattaaccaagcgatcaacacgttaaatgcagcgcaaggtgaaactgacaagtttgcagtgaagtacgacaagaatgctgatggcagtgcaaactacaacaacatcacattggcaggtacgactgcaagtagcacgcaagatgcaacaacaggcaagatcaccacaacaggtggaacaagcttgaacaacgttgcaagtgcaggtgactacaaagatgttgccaatgcaagcaaaggtgtaaacgcaggtgacttgaacaatgcagttgttgatgcaaccaatgcagcaaccagcaaaggctttgcattacaagcagcagatggcgctaaagttcagaagaacctaggcgaagcagttgaagttgtcggtgcggacagcaacatcaccacaaaagtagtgggtggacaagttgcgattgagttaaataaaaacctcaacaacttaactggcattaccgtgaacgatggaaccaatggcacaaatggttcaactgtgattggtaaagatggtatttcggttaaagatggttcaggtaataccattgcaggtgtagataacacagcgttgacagttaaagatggcagtggcaacacagaaaccagcattaaccaagcgatcaacacgttaaatgcagcgcaaggtgaaactgataagtttgcagtgaagtacgacaaaaatgctgatggcagtgtgaactacaacaacatcacattggcaggtacgactgcaagcagtacacaagatgcaactacaggcaagatcaccacaacaggtggaacaagcttgaacaatgttgcaagtgcgggtgactacaaagatgttgccaatgcaagcaaaggtgtaaacgcaggtgacttaaacaatgcagttgttgatgcaaccaatgcagcaaccagcaaaggctttgcattacaagcagcagatggcgctaaagttcagaagaacctaggcgaagcagttgaagttgtcggtgccgacagcaacatcaccacaaaagttgcaggcggtcaggttgcaattgagttaaataaaaacctcaacaacttaactggcattaccgtgaacgatggaaccaatggcaccaatggttcaactgtgattggtaaagatggtatttcagttaaagacggttcaggcaataccattgcaggtgtagataacacagcgttgacagttaaagatggcagtggcaacacagaaaccagcattaaccaagcgatcaacacgttaaatgcagcgcaaggtgaaactgataagtttgcagtgaagtacgacaaaaatgctgatggcagtgtgaactacaacaacatcacattggcaggtacgactgcaagcagtacacaagatgcaactacaggcaagatcaccacaacaggtggtacaagcttgaacaatgttgcaagtgcgggtgactacaaagatgttgccaatgcaagcaaaggtgtaaacgcaggtgacttgaacaatgcagttgttgatgcaaccaatgcagcgaccagcaaaggctttgcattacaagcagcagatggcgctaaagttcagaagaacctaggcgaagcagttgaagttgttggtgcggacagtaacatcaccacgaaagttgcaggcggtcaggttgcaattgagttaaataaaaacctcaacaacttaactggcattaccgtgaacgatggaaccaatggcaccaatggatctactgtgattggtaaagatggtatttcggttaaagatggttcaggcaataccattgcaggtgtagataacacagcgttgacagttaaagatggcagtggcaacacagaaaccagcattaaccaagcgatcaacacgttaaatgcagcgcaaggtgaaactgataagtttgcagtgaagtacgacaaaaatgctgatggcagtgcaaactataacaatgtcactttagctggtacaaatggcacaataatcagcaatgttaaagcgggtgctgtgacctcaacatctactgatgcgatcaatggtagccaattatatggtgttgcaaacagcgtgaagaatgcaattggtggttcaaccacaattgatgcaacgactggtgcaatcacgacgaccaatattggtggtacaggttcaaatacgattgatggtgcaatcagcagtattaaagattcagcgactaaagcgaaaaccacggtaagtgctggggataatgttgtcgttacatcgggtaccaatgcagatggctcaacaaactatgaagttgcgacagcgaaagacgttaactttgacaaagtgactgtaggtagtgttgttgtagataaatcaagcaatacaatcaaaggattaagtaataccacttggaacggaacagcagtatcaggtcaagcggcgacagaagaccagttaaaaacggtcagcgatgcgcaaggtgaaactgataagtttgcagtgaagtacgacaaaaatgctgatggcagtgcgaactacaacagtattactgcaggcaatggtaacggtactgcagcaacgatcggaactgacacagcaggtaatagtgttgtgaccagtggcggaactaaaattagtaatgttgcgaatggtgtcaatgcaagtgatgcagtaaacaaaggtcaattggatagcttaagtacaggtcttaccaatacaggctttggtttaaaagcagcagatggcaacaccgttaacaaaaaattaggcgaagcagtagacgttgtcggtgctgacagcaacatcaccacgaaagttgcaggcggtcaggttgcgattgagttaaataaaaacctcaacaacttaactggcattaccgtgaacgatggaaccaatggcaccaatggttcaactgtgattggtaaagatggtatttcgattaaagatggttcaggcaataccattgcaggtgtagataacacagcgttgacggttaaagatagcagtggcaacacagaaaccagcattaaccaagcgatcaacacgttaaatgcagcgcaaggtgaaactgataagtttgcagtgaagtacgataagaatgctgatggcagtgtgaactataacaatgtcactttagcaggtacaaatggcacaataatcagaaatgttaaagcgggtgctgtgacctcaacatctactgatgcgatcaatggtagccaattatacgatattgcaaacagcgtgaagaatgcaattggtggttcaaccacaagagatgtaacgactggtgcaatcacaacgaccaatattggtggtacaggttcaaacacgattgatggtgcaatcagcagtattaaagattcagcgactaaagcgaaaaccacgataagtgctggggataatgttgtcgttacatcgggtaccaatgcagatggatccacaaactatgaagttgcgacagcgaaagacgttaactttgacaaagtaactgtaggtaatgttgttgttgataaggcaaatgacacgatccaaggtttgagcaataaagatctaaattcaactgattttgcgaccaaaggtagagctgcgactgaagaacagttaaaagcagtgattaccagtaatatcacggaagttgtggatggtaatggcaacaaggtgaatattattgaccaagttgtaaataccaaacctgacaataagaaccaagattcattgttcttaacgtatgacaaacaaggtcaagaaaccacagatcgcctaacgattggtcaaacggtacagaagatgaatactgatggtattaaattcttccataccaatgccgatacatcaaaaggtgatttgggtacaacaaatgactcaagtgcaggtggtttaaactctacagcaattggtgtaaatgcgattgttgcgaatggtgcagatagttcagttgctttaggtcataacaccaaagtcaatggtaaacaatcaattgcaattggttctggtgcagaagctttaggcaatcaatcgatcagtattggtacaggcaataaagtcactggtgatcattcgggtgcgattggtgatccaactattgtaaatggtgcaaacagctactctgtgggtaataacaaccaagtacttacagatgacactttcgtacttggaaacaatgtcaccaaaactattgctggttcagtagtattgggtaacggttcagctgcaacgacaggtgctggtgaggcaggctatgccttatctgtagcaacaaatgcagataaagccgcgatcactaaaactacgtcaagcactggtgctgttgcagttggtgatgcgtcgagcggtatttatcgtcaaattaccggtgttgctgcgggtagcgtagattcagatgctgtgaacgttgcacagttaaaagcggtgggtaaccaagttgtaacgactcaaactacattggtgaacagtttgggtggtaacgctaaagtaaatgcagacggtacgattacaggaccaacttataatgttgctcaaggtaatcagaccaatgttggtgatgcattaactgcgcttgataacgcaattaatactgcggcaacaacatctaaatcgactgtttctaatggtcagaatattgttgtcagcaagagcaaaaatgcagatggttcagacaactatgaagtatcaacagcaaaagacttgacagttgattctgtcaaagcgggtgatacggttctgaataatgcaggtattacaattggcaataacgcagttgtattgaacaacactggattaaccattagtggtggaccaagtgttaccttggcaggcatcgatgcaggcaataaaaccattcaaaatgttgcgaatgcagtaaatgcaacagatgcagtcaacaaagggcaattggacagcgcaattaacaatgtgaataacaatgtaaatgagcttgccaacaacgctgttaaatatgacgatgcatcaaaagataagatcacacttggtggtggggcaactggtacaacaatcaccaatgtgaaagatggtactgttgcgcaaggttctaaagatgctgtgaatggcggtcaattgtggaatgttcaacaacaagttgatcagaacacaactgatattagcaatatcaaaaatgatattaacaacggtactgttggtttggttcaacaagcaggtaaagatgcaccagtgacggttgcaaaagatactggcggtacaacggtgaatgtcgctggaacagatggcaaccgagtagtgacaggtgttaaggaaggtgcagtgaatgcaacatctaaagatgctgtcaatggtagtcaattgaatacaaccaaccaagcggtagtcaattatcttggtggtggggcaggttatgacaacattacaggtagcttcacagcgccaagttatacggtaggtgactcgaaatacaacaatgttggtggcgcaattgatgcattgaatcaagcagatcaagcattgaatagcaaaattgacaatgtcagtaacaagttggataacgcattccgtattaccaacaaccgtattgatgatgtagagaaaaaagccaatgctggtattgccgctgcgatggctctggaatcagcaccatatgtcccaggtaaatatacctatgcagcaggcgcagcttaccacggtggtgaaaatgcggtaggtgtgactttacgtaaaactgcagacaatggtcgttggtcgattacaggcggtgtagctgcagcgtctcaaggcgatgcaagtgttcgtatcggtatcagcggtgtgattgactaa

SEQ ID NO: 9 - protein, 3450 aa, artificial sequence
  Synthetic Construct
MNKIYKVIWNATLLAWVAVSELAKGKTKSTTSKSKAKSLSSSVIVGGIILTTPLSLIAATVQVGGGTNSGTTATASTNCADLYNYQNPENSGSGAAGNYNAGNPSVCSIAIGENAQGGTSGTGGSPGIAIGGNSKATGGLSVAIGGYAQATNVGSIALGTAALSSGFNSLAISRQAAATNNYSIAIGTTSVSKGVGSIAMGHSTNASGDQSIAIGSSDAVNSATATTTYDGTTNTQASGSKSIAIGASAKASTNNSIALGAGSVTSAQSGNSYLTGVGASATNGVVSVGTSTATRRIQNVADGSAASDAVTVAQLDKAYDDTNGRLDTAGLKFKGDTATTSNTKKLGDTVSITGDTNISTVATTDGVQVKLNPNLDLGATGSVKTGNTTINNAGVTADQVTVGGVVINNTSGINAGGKAITNVAAPTNNTDAANKKYVDDAGTALTNLGFGLKAQDGTTVNKKLGEAVDIVGSNSNISTKVNAGKVEVALSNTLDLGTTGSVTTGSTVINNAGVTATQVTANKVTINNAPTAGTDATNKTYVDSKAAASRTEVAAGSNVSGVVKTTGANGQDIYAVNANGTTASAGSSAVTVTPGTKDANNVTDYKVDLSATTKTDIQKGVDAKNAVDTAGLKFKGDTATTSNTKKLGDTVSITGDTNISTVATTDGVQVKLNPNLDLGATGSVKTGNTTINNAGVTADQVTVGGVVINNTSGINAGGKAITNVAAPTNNTDAANKKYVDDAGTALTNLGFGLKAQDGTTVNKKLGEAVDIVGSNSNISTKVNAGKVEVALSNTLDLGTTGSVTTGSTVINNAGVTATQVTANKVTVNNAPTAGTDATNKTYVDSKAAASRTEVAAGSNVSGVVKTTGANGQDVYTVNANGTTASAGSSAVTVTPGTKDANNVTDYKVDLSATTKTDIQKGVDAKNAVDTAGLKFKGDTATTSNTKKLGDTVSITGDTNISTVATTDGVQVKLNPNLDLGATGSVKTGNTTINNAGVTADQVTVGGVVINNTSGINAGGKAITNVAAPTNNTDAANKKYVDDAGTALTNLGFGLKAQDGTTVNKKLGEAVEVVGADSNITTKVAGGQVAIELNKNLNNLTGITVNDGTNGTNGSTVIGKDGISVKDGSGNTIAGVDNTALTVKDGSGNTETSINQAINTLNAAQGETDKFAVKYDKNADGSVNYNNITLAGTTASSTQDATTGKITTTGGTSLNNVASAGDYKDVANASKGVNAGDLNNAVVDATNAATSKGFALQAADGAKVQKNLGEAVEVVGADSNITTKVAGGQVAIELNKNLNNLTGITVNDGTNGTNGSTVIGKDGISVKDGSGNTIAGVDNTALTVKDGSGNTETSINQAINTLNAAQGETDKFAVKYDKNTDGSTNYNSITAGNGNGTAATIGTDTAGNSVVTSGGTKISNVANGVNASDAVNKGQLDSLSTGLTNTGFGLKAADGNTVNKKLGEAVDVVGADSNITTKVAGGQVAIELNKNLNNLTGITVNDGTNGTNGSTVIGKDGISIKDGSGNTIAGVDNTALTVKDGSGNTETSINQAINTLNAAQGETDKFAVKYDKNADGSANYNNITLAGTTASSTQDATTGKITTTGGTSLNNVASAGDYKDVANASKGVNAGDLNNAVVDATNAATSKGFALQAADGAKVQKNLGEAVEVVGADSNITTKVVGGQVAIELNKNLNNLTGITVNDGTNGTNGSTVIGKDGISVKDGSGNTIAGVDNTALTVKDGSGNTETSINQAINTLNAAQGETDKFAVKYDKNADGSVNYNNITLAGTTASSTQDATTGKITTTGGTSLNNVASAGDYKDVANASKGVNAGDLNNAVVDATNAATSKGFALQAADGAKVQKNLGEAVEVVGADSNITTKVAGGQVAIELNKNLNNLTGITVNDGTNGTNGSTVIGKDGISVKDGSGNTIAGVDNTALTVKDGSGNTETSINQAINTLNAAQGETDKFAVKYDKNADGSVNYNNITLAGTTASSTQDATTGKITTTGGTSLNNVASAGDYKDVANASKGVNAGDLNNAVVDATNAATSKGFALQAADGAKVQKNLGEAVEVVGADSNITTKVAGGQVAIELNKNLNNLTGITVNDGTNGTNGSTVIGKDGISVKDGSGNTIAGVDNTALTVKDGSGNTETSINQAINTLNAAQGETDKFAVKYDKNADGSANYNNVTLAGTNGTIISNVKAGAVTSTSTDAINGSQLYGVANSVKNAIGGSTTIDATTGAITTTNIGGTGSNTIDGAISSIKDSATKAKTTVSAGDNVVVTSGTNADGSTNYEVATAKDVNFDKVTVGSVVVDKSSNTIKGLSNTTWNGTAVSGQAATEDQLKTVSDAQGETDKFAVKYDKNADGSANYNSITAGNGNGTAATIGTDTAGNSVVTSGGTKISNVANGVNASDAVNKGQLDSLSTGLTNTGFGLKAADGNTVNKKLGEAVDVVGADSNITTKVAGGQVAIELNKNLNNLTGITVNDGTNGTNGSTVIGKDGISIKDGSGNTIAGVDNTALTVKDSSGNTETSINQAINTLNAAQGETDKFAVKYDKNADGSVNYNNVTLAGTNGTIIRNVKAGAVTSTSTDAINGSQLYDIANSVKNAIGGSTTRDVTTGAITTTNIGGTGSNTIDGAISSIKDSATKAKTTISAGDNVVVTSGTNADGSTNYEVATAKDVNFDKVTVGNVVVDKANDTIQGLSNKDLNSTDFATKGRAATEEQLKAVITSNITEVVDGNGNKVNIIDQVVNTKPDNKNQDSLFLTYDKQGQETTDRLTIGQTVQKMNTDGIKFFHTNADTSKGDLGTTNDSSAGGLNSTAIGVNAIVANGADSSVALGHNTKVNGKQSIAIGSGAEALGNQSISIGTGNKVTGDHSGAIGDPTIVNGANSYSVGNNNQVLTDDTFVLGNNVTKTIAGSVVLGNGSAATTGAGEAGYALSVATNADKAAITKTTSSTGAVAVGDASSGIYRQITGVAAGSVDSDAVNVAQLKAVGNQVVTTQTTLVNSLGGNAKVNADGTITGPTYNVAQGNQTNVGDALTALDNAINTAATTSKSTVSNGQNIVVSKSKNADGSDNYEVSTAKDLTVDSVKAGDTVLNNAGITIGNNAVVLNNTGLTISGGPSVTLAGIDAGNKTIQNVANAVNATDAVNKGQLDSAINNVNNNVNELANNAVKYDDASKDKITLGGGATGTTITNVKDGTVAQGSKDAVNGGQLWNVQQQVDQNTTDISNIKNDINNGTVGLVQQAGKDAPVTVAKDTGGTTVNVAGTDGNRVVTGVKEGAVNATSKDAVNGSQLNTTNQAVVNYLGGGAGYDNITGSFTAPSYTVGDSKYNNVGGAIDALNQADQALNSKIDNVSNKLDNAFRITNNRIDDVEKKANAGIAAAMALESAPYVPGKYTYAAGAAYHGGENAVGVTLRKTADNGRWSITGGVAAASQGDASVRIGISGVID

SEQ ID NO: 10 - DNA, 8400 bp, artificial sequence
  AtaA lacking a portion of Nstalk
  CDS (1)..(8400)
atgaataaaatctacaaagtgatttggaatgcgactttgttggcatgggttgcagtatctgaattggcaaaagggaaaaccaaatctacgacatcaaaatccaaagctaaatcattatcttcatctgtaatagttggtgggataatattaacaacacctttatctttaatagcagctactgttcaagttggagggggaactaattctggaacaactgctacagcttctacgaattgtgcagacttatataattatcaaaatcctgagaactcaggctctggagcggctgggaattataatgcaggaaatccaagtgtgtgttcgatcgctataggtgaaaacgcacaaggtggtacttctggaactggagggtcgccagggatagcgataggtggaaattctaaagctacgggtggtttatctgttgctataggcggatatgctcaagcgacaaatgttggaagtattgctttaggcacagcagctttatcaagtggttttaacagtttagcaatatccagacaagctgctgcaacgaataactattcaatagctataggtacaacttcagtttcgaaaggagttggatcgattgctatggggcattcaacgaatgcttctggagatcaatcgatagcaattggtagctcggatgctgttaattcagcaacagcaacaacaacatacgatggtacaacaaatactcaagcatcaggtagtaaatcgattgctataggtgcaagcgcaaaggcatcaaccaataacagcattgcactaggtgcaggatcggtaacttctgcacaatctggtaattcttatcttactggtgtaggtgcatcagctacaaatggtgttgtatctgttggaacttcaactgcaacacgtcgtatccaaaatgtagcagatggttcagccgcttcagatgctgtgacagttgctcagttggataaagcttatgatgatacaaatggtcgtttagctgctgctttaggtacaggtagtggtgctgcctataatgcagcaaacaatacatataccgctccaacgaatattgggggaacaggtaaaaatacgattgatgatgcaattaaagcaactcaacgaagtgtagtcgctggatcaaatattgtcgttaccccgacgacagcttctgatggttcaatatcgtattcggttgctacaagcgcaacaccgacgtttacaagtataactgtaaacaatgcaccaacggcaggtacagatgcgaccaacaagacttatgtagactcaaaagcagcagcatcgagaacagaagtagcagctggaagcaatgtatctggtgtagtaaaaacgacaggcgcaaacggtcaagacgtttatacagtaaatgccaatggtacgactgcatcagcaggttcttcagcagttaccgtaacaccaggcacgaaagatgcaaataatgtcactgactataaagtagacttatcagcgactacaaaaaccgatatccaaaaaggtgtagatgcaaaaaatgctgtaaacacgttaaatgcagcgcaaggtgaaactgataagtttgcagtgaagtacgacaaaaatgctgatggcagtgtgaactacaacaacatcacattggcaggtacgactgcaagcagtacacaagatgcaactacaggcaagatcaccacaacaggtggaacaagcttgaacaatgttgcaagtgcgggtgactacaaagatgttgccaatgcaagcaaaggtgtaaacgcaggtgacttaaacaatgcagttgttgatgcaaccaatgcagcaaccagcaaaggctttgcattacaagcagcagatggcgctaaagttcagaagaacctaggcgaagcagttgaagttgtcggtgccgacagcaacatcaccacaaaagttgcaggcggtcaggttgcaattgagttaaataaaaacctcaacaacttaactggcattaccgtgaacgatggaaccaatggcaccaatggttcaactgtgattggtaaagatggtatttcagttaaagacggttcaggcaataccattgcaggtgtagataacacagcgttgacagttaaagatggcagtggcaacacagaaaccagcattaaccaagcgatcaacacgttaaatgcagcgcaaggtgaaactgataagtttgcagtgaagtacgacaaaaatacggatggtagtaccaactacaacagtattactgcaggcaatggtaacggtactgcagcaacgatcggaactgacacagcaggtaatagtgttgtgaccagtggcggaactaaaattagtaatgttgcgaatggtgtcaatgcaagtgatgcagtaaacaaaggtcaattggatagcttaagtacaggtcttaccaatacaggctttggtttaaaagcagcagatggcaacaccgttaacaaaaaattaggcgaagcagtagacgttgtcggtgctgacagcaacatcaccacgaaagttgcaggcggtcaggttgcgattgagttaaataaaaacctcaacaacttaactggcattaccgtgaacgatggaaccaatggcaccaatggttcaactgtgattggtaaagatggtatttcgattaaagatggttcaggcaataccattgcaggtgtagataacacagcgttgacagttaaagatggcagtggcaacacagaaaccagcattaaccaagcgatcaacacgttaaatgcagcgcaaggtgaaactgacaagtttgcagtgaagtacgacaagaatgctgatggcagtgcaaactacaacaacatcacattggcaggtacgactgcaagtagcacgcaagatgcaacaacaggcaagatcaccacaacaggtggaacaagcttgaacaacgttgcaagtgcaggtgactacaaagatgttgccaatgcaagcaaaggtgtaaacgcaggtgacttgaacaatgcagttgttgatgcaaccaatgcagcaaccagcaaaggctttgcattacaagcagcagatggcgctaaagttcagaagaacctaggcgaagcagttgaagttgtcggtgcggacagcaacatcaccacaaaagtagtgggtggacaagttgcgattgagttaaataaaaacctcaacaacttaactggcattaccgtgaacgatggaaccaatggcacaaatggttcaactgtgattggtaaagatggtatttcggttaaagatggttcaggtaataccattgcaggtgtagataacacagcgttgacagttaaagatggcagtggcaacacagaaaccagcattaaccaagcgatcaacacgttaaatgcagcgcaaggtgaaactgataagtttgcagtgaagtacgacaaaaatgctgatggcagtgtgaactacaacaacatcacattggcaggtacgactgcaagcagtacacaagatgcaactacaggcaagatcaccacaacaggtggaacaagcttgaacaatgttgcaagtgcgggtgactacaaagatgttgccaatgcaagcaaaggtgtaaacgcaggtgacttaaacaatgcagttgttgatgcaaccaatgcagcaaccagcaaaggctttgcattacaagcagcagatggcgctaaagttcagaagaacctaggcgaagcagttgaagttgtcggtgccgacagcaacatcaccacaaaagttgcaggcggtcaggttgcaattgagttaaataaaaacctcaacaacttaactggcattaccgtgaacgatggaaccaatggcaccaatggttcaactgtgattggtaaagatggtatttcagttaaagacggttcaggcaataccattgcaggtgtagataacacagcgttgacagttaaagatggcagtggcaacacagaaaccagcattaaccaagcgatcaacacgttaaatgcagcgcaaggtgaaactgataagtttgcagtgaagtacgacaaaaatgctgatggcagtgtgaactacaacaacatcacattggcaggtacgactgcaagcagtacacaagatgcaactacaggcaagatcaccacaacaggtggtacaagcttgaacaatgttgcaagtgcgggtgactacaaagatgttgccaatgcaagcaaaggtgtaaacgcaggtgacttgaacaatgcagttgttgatgcaaccaatgcagcgaccagcaaaggctttgcattacaagcagcagatggcgctaaagttcagaagaacctaggcgaagcagttgaagttgttggtgcggacagtaacatcaccacgaaagttgcaggcggtcaggttgcaattgagttaaataaaaacctcaacaacttaactggcattaccgtgaacgatggaaccaatggcaccaatggttcaactgtgattggtaaagatggtatttcggttaaagatggttcaggcaataccattgcaggtgtagataacacagcgttgacagttaaagatggcagtggcaacacagaaaccagcattaaccaagcgatcaacacgttaaatgcagcgcaaggtgaaactgataagtttgcagtgaagtacgacaaaaatgctgatggcagtgcaaactataacaatgtcactttagctggtacaaatggcacaataatcagcaatgttaaagcgggtgctgtgacctcaacatctactgatgcgatcaatggtagccaattatatggtgttgcaaacagcgtgaagaatgcaattggtggttcaaccacaattgatgcaacgactggtgcaatcacgacgaccaatattggtggtacaggttcaaatacgattgatggtgcaatcagcagtattaaagattcagcgactaaagcgaaaaccacggtaagtgctggggataatgttgtcgttacatcgggtaccaatgcagatggctcaacaaactatgaagttgcgacagcgaaagacgttaactttgacaaagtgactgtaggtagtgttgttgtagataaatcaagcaatacaatcaaaggattaagtaataccacttggaacggaacagcagtatcaggtcaagcggcgacagaagaccagttaaaaacggtcagcgatgcgcaaggtgaaactgataagtttgcagtgaagtacgacaaaaatgctgatggcagtgcgaactacaacagtattactgcaggcaatggtaacggtactgcagcaacgatcggaactgacacagcaggtaatagtgttgtgaccagtggcggaactaaaattagtaatgttgcgaatggtgtcaatgcaagtgatgcagtaaacaaaggtcaattggatagcttaagtacaggtcttaccaatacaggctttggtttaaaagcagcagatggcaacaccgttaacaaaaaattaggcgaagcagtagacgttgtcggtgctgacagcaacatcaccacgaaagttgcaggcggtcaggttgcgattgagttaaataaaaacctcaacaacttaactggcattaccgtgaacgatggaaccaatggcaccaatggttcaactgtgattggtaaagatggtatttcgattaaagatggttcaggcaataccattgcaggtgtagataacacagcgttgacggttaaagatagcagtggcaacacagaaaccagcattaaccaagcgatcaacacgttaaatgcagcgcaaggtgaaactgataagtttgcagtgaagtacgataagaatgctgatggcagtgtgaactataacaatgtcactttagcaggtacaaatggcacaataatcagaaatgttaaagcgggtgctgtgacctcaacatctactgatgcgatcaatggtagccaattatacgatattgcaaacagcgtgaagaatgcaattggtggttcaaccacaagagatgtaacgactggtgcaatcacaacgaccaatattggtggtacaggttcaaacacgattgatggtgcaatcagcagtattaaagattcagcgactaaagcgaaaaccacgataagtgctggggataatgttgtcgttacatcgggtaccaatgcagatggctcaacaaactatgaagttgcgacagcgaaagacgttaactttgacaaagtaactgtaggtaatgttgttgttgataaggcaaatgacacgatccaaggtttgagcaataaagatctaaattcaactgattttgcgaccaaaggtagagctgcgactgaagaacagttaaaagcagtgattaccagtaatatcacggaagttgtggatggtaatggcaacaaggtgaatattattgaccaagttgtaaataccaaacctgacaataagaaccaagattcattgttcttaacgtatgacaaacaaggtcaagaaaccacagatcgcctaacgattggtcaaacggtacagaagatgaatactgatggtattaaattcttccataccaatgccgatacatcaaaaggtgatttgggtacaacaaatgactcaagtgcaggtggtttaaactctacagcaattggtgtaaatgcgattgttgcgaatggtgcagatagttcagttgctttaggtcataacaccaaagtcaatggtaaacaatcaattgcaattggttctggtgcagaagctttaggcaatcaatcgatcagtattggtacaggcaataaagtcactggtgatcattcgggtgcgattggtgatccaactattgtaaatggtgcaaacagctactctgtgggtaataacaaccaagtacttacagatgacactttcgtacttggaaacaatgtcaccaaaactattgctggttcagtagtattgggtaacggttcagctgcaacgacaggtgctggtgaggcaggctatgccttatctgtagcaacaaatgcagataaagccgcgatcactaaaactacgtcaagcactggtgctgttgcagttggtgatgcgtcgagcggtatttatcgtcaaattaccggtgttgctgcgggtagcgtagattcagatgctgtgaacgttgcacagttaaaagcggtgggtaaccaagttgtaacgactcaaactacattggtgaacagtttgggtggtaacgctaaagtaaatgcagacggtacgattacaggaccaacttataatgttgctcaaggtaatcagaccaatgttggtgatgcattaactgcgcttgataacgcaattaatactgcggcaacaacatctaaatcgactgtttctaatggtcagaatattgttgtcagcaagagcaaaaatgcagatggttcagacaactatgaagtatcaacagcaaaagacttgacagttgattctgtcaaagcgggtgatacggttctgaataatgcaggtattacaattggcaataacgcagttgtattgaacaacactggattaaccattagtggtggaccaagtgttaccttggcaggcatcgatgcaggcaataaaaccattcaaaatgttgcgaatgcagtaaatgcaacagatgcagtcaacaaagggcaattggacagcgcaattaacaatgtgaataacaatgtaaatgagcttgccaacaacgctgttaaatatgacgatgcatcaaaagataagatcacacttggtggtggggcaactggtacaacaatcaccaatgtgaaagatggtactgttgcgcaaggttctaaagatgctgtgaatggcggtcaattgtggaatgttcaacaacaagttgatcagaacacaactgatattagcaatatcaaaaatgatattaacaacggtactgttggtttggttcaacaagcaggtaaagatgcaccagtgacggttgcaaaagatactggcggtacaacggtgaatgtcgctggaacagatggcaaccgagtagtgacaggtgttaaggaaggtgcagtgaatgcaacatctaaagatgctgtcaatggtagtcaattgaatacaaccaaccaagcggtagtcaattatcttggtggtggggcaggttatgacaacattacaggtagcttcacagcgccaagttatacggtaggtgactcgaaatacaacaatgttggtggcgcaattgatgcattgaatcaagcagatcaagcattgaatagcaaaattgacaatgtcagtaacaagttggataacgcattccgtattaccaacaaccgtattgatgatgtagagaaaaaagccaatgctggtattgccgctgcgatggctctggaatcagcaccatatgtcccaggtaaatatacctatgcagcaggcgcagcttaccacggtggtgaaaatgcggtaggtgtgactttacgtaaaactgcagacaatggtcgttggtcgattacaggcggtgtagctgcagcgtctcaaggcgatgcaagtgttcgtatcggtatcagcggtgtgattgactaa

SEQ ID NO: 11 - protein, 2799 aa, artificial sequence
  Synthetic Construct
MNKIYKVIWNATLLAWVAVSELAKGKTKSTTSKSKAKSLSSSVIVGGIILTTPLSLIAATVQVGGGTNSGTTATASTNCADLYNYQNPENSGSGAAGNYNAGNPSVCSIAIGENAQGGTSGTGGSPGIAIGGNSKATGGLSVAIGGYAQATNVGSIALGTAALSSGFNSLAISRQAAATNNYSIAIGTTSVSKGVGSIAMGHSTNASGDQSIAIGSSDAVNSATATTTYDGTTNTQASGSKSIAIGASAKASTNNSIALGAGSVTSAQSGNSYLTGVGASATNGVVSVGTSTATRRIQNVADGSAASDAVTVAQLDKAYDDTNGRLAAALGTGSGAAYNAANNTYTAPTNIGGTGKNTIDDAIKATQRSVVAGSNIVVTPTTASDGSISYSVATSATPTFTSITVNNAPTAGTDATNKTYVDSKAAASRTEVAAGSNVSGVVKTTGANGQDVYTVNANGTTASAGSSAVTVTPGTKDANNVTDYKVDLSATTKTDIQKGVDAKNAVNTLNAAQGETDKFAVKYDKNADGSVNYNNITLAGTTASSTQDATTGKITTTGGTSLNNVASAGDYKDVANASKGVNAGDLNNAVVDATNAATSKGFALQAADGAKVQKNLGEAVEVVGADSNITTKVAGGQVAIELNKNLNNLTGITVNDGTNGTNGSTVIGKDGISVKDGSGNTIAGVDNTALTVKDGSGNTETSINQAINTLNAAQGETDKFAVKYDKNTDGSTNYNSITAGNGNGTAATIGTDTAGNSVVTSGGTKISNVANGVNASDAVNKGQLDSLSTGLTNTGFGLKAADGNTVNKKLGEAVDVVGADSNITTKVAGGQVAIELNKNLNNLTGITVNDGTNGTNGSTVIGKDGISIKDGSGNTIAGVDNTALTVKDGSGNTETSINQAINTLNAAQGETDKFAVKYDKNADGSANYNNITLAGTTASSTQDATTGKITTTGGTSLNNVASAGDYKDVANASKGVNAGDLNNAVVDATNAATSKGFALQAADGAKVQKNLGEAVEVVGADSNITTKVVGGQVAIELNKNLNNLTGITVNDGTNGTNGSTVIGKDGISVKDGSGNTIAGVDNTALTVKDGSGNTETSINQAINTLNAAQGETDKFAVKYDKNADGSVNYNNITLAGTTASSTQDATTGKITTTGGTSLNNVASAGDYKDVANASKGVNAGDLNNAVVDATNAATSKGFALQAADGAKVQKNLGEAVEVVGADSNITTKVAGGQVAIELNKNLNNLTGITVNDGTNGTNGSTVIGKDGISVKDGSGNTIAGVDNTALTVKDGSGNTETSINQAINTLNAAQGETDKFAVKYDKNADGSVNYNNITLAGTTASSTQDATTGKITTTGGTSLNNVASAGDYKDVANASKGVNAGDLNNAVVDATNAATSKGFALQAADGAKVQKNLGEAVEVVGADSNITTKVAGGQVAIELNKNLNNLTGITVNDGTNGTNGSTVIGKDGISVKDGSGNTIAGVDNTALTVKDGSGNTETSINQAINTLNAAQGETDKFAVKYDKNADGSANYNNVTLAGTNGTIISNVKAGAVTSTSTDAINGSQLYGVANSVKNAIGGSTTIDATTGAITTTNIGGTGSNTIDGAISSIKDSATKAKTTVSAGDNVVVTSGTNADGSTNYEVATAKDVNFDKVTVGSVVVDKSSNTIKGLSNTTWNGTAVSGQAATEDQLKTVSDAQGETDKFAVKYDKNADGSANYNSITAGNGNGTAATIGTDTAGNSVVTSGGTKISNVANGVNASDAVNKGQLDSLSTGLTNTGFGLKAADGNTVNKKLGEAVDVVGADSNITTKVAGGQVAIELNKNLNNLTGITVNDGTNGTNGSTVIGKDGISIKDGSGNTIAGVDNTALTVKDSSGNTETSINQAINTLNAAQGETDKFAVKYDKNADGSVNYNNVTLAGTNGTIIRNVKAGAVTSTSTDAINGSQLYDIANSVKNAIGGSTTRDVTTGAITTTNIGGTGSNTIDGAISSIKDSATKAKTTISAGDNVVVTSGTNADGSTNYEVATAKDVNFDKVTVGNVVVDKANDTIQGLSNKDLNSTDFATKGRAATEEQLKAVITSNITEVVDGNGNKVNIIDQVVNTKPDNKNQDSLFLTYDKQGQETTDRLTIGQTVQKMNTDGIKFFHTNADTSKGDLGTTNDSSAGGLNSTAIGVNAIVANGADSSVALGHNTKVNGKQSIAIGSGAEALGNQSISIGTGNKVTGDHSGAIGDPTIVNGANSYSVGNNNQVLTDDTFVLGNNVTKTIAGSVVLGNGSAATTGAGEAGYALSVATNADKAAITKTTSSTGAVAVGDASSGIYRQITGVAAGSVDSDAVNVAQLKAVGNQVVTTQTTLVNSLGGNAKVNADGTITGPTYNVAQGNQTNVGDALTALDNAINTAATTSKSTVSNGQNIVVSKSKNADGSDNYEVSTAKDLTVDSVKAGDTVLNNAGITIGNNAVVLNNTGLTISGGPSVTLAGIDAGNKTIQNVANAVNATDAVNKGQLDSAINNVNNNVNELANNAVKYDDASKDKITLGGGATGTTITNVKDGTVAQGSKDAVNGGQLWNVQQQVDQNTTDISNIKNDINNGTVGLVQQAGKDAPVTVAKDTGGTTVNVAGTDGNRVVTGVKEGAVNATSKDAVNGSQLNTTNQAVVNYLGGGAGYDNITGSFTAPSYTVGDSKYNNVGGAIDALNQADQALNSKIDNVSNKLDNAFRITNNRIDDVEKKANAGIAAAMALESAPYVPGKYTYAAGAAYHGGENAVGVTLRKTADNGRWSITGGVAAASQGDASVRIGISGVID

SEQ ID NO: 12 - DNA, 7899 bp, artificial sequence
  AtaA lacking a portion of Nstalk
  CDS (1)..(7899)
atgaataaaatctacaaagtgatttggaatgcgactttgttggcatgggttgcagtatctgaattggcaaaagggaaaaccaaatctacgacatcaaaatccaaagctaaatcattatcttcatctgtaatagttggtgggataatattaacaacacctttatctttaatagcagctactgttcaagttggagggggaactaattctggaacaactgctacagcttctacgaattgtgcagacttatataattatcaaaatcctgagaactcaggctctggagcggctgggaattataatgcaggaaatccaagtgtgtgttcgatcgctataggtgaaaacgcacaaggtggtacttctggaactggagggtcgccagggatagcgataggtggaaattctaaagctacgggtggtttatctgttgctataggcggatatgctcaagcgacaaatgttggaagtattgctttaggcacagcagctttatcaagtggttttaacagtttagcaatatccagacaagctgctgcaacgaataactattcaatagctataggtacaacttcagtttcgaaaggagttggatcgattgctatggggcattcaacgaatgcttctggagatcaatcgatagcaattggtagctcggatgctgttaattcagcaacagcaacaacaacatacgatggtacaacaaatactcaagcatcaggtagtaaatcgattgctataggtgcaagcgcaaaggcatcaaccaataacagcattgcactaggtgcaggatcggtaacttctgcacaatctggtaattcttatcttactggtgtaggtgcatcagctacaaatggtgttgtatctgttggaacttcaactgcaacacgtcgtatccaaaatgtagcagatggttcagccgcttcagatgctgtgacagttgctcagttggataaagcttatgatgatacaaatggtcgtttagctgctgctttaggtacaggtagtggtgctgcctataatgcagcaaacaatacatataccgctccaacgaatattgggggaacaggtaaaaatacgattgatgatgcaattaaagcaactcaacgaagtgtagtcgctggatcaaatattgtcgttaccccgacgacagcttctgatggttcaatatcgtattcggttgctacaagcgcaacaccgacgtttacaagtataactgtaaacaatgcaccaacggcaggtacagatgcgaccaacaagacttatgtagactcaaaagcagcagcatcgagaacagaagtagcagctggaagcaatgtatctggtgtagtaaaaacgacaggcgcaaacggtcaagacgtttatacagtaaatgccaatggtacgactgcatcagcaggttcttcagcagttaccgtaacaccaggcacgaaagatgcaaataatgtcactgactataaagtagacttatcagcgactacaaaaaccgatatccaaaaaggtgtagatgcaaaaaatgctgtagataccgcaggtctaaaatttaaaggtgatacagcaaccacaagcaataccaagaaattaggtgacaccgtttcgattacgggtgatacgaacattagtacagttgcgacaacagatggtgtacaggttaagttaaatccaaacttggatttaggagcaactggtagcgttaaaacgggtaataccacgattaacaatgcaggtgtaacagctgatcaagttacggttggtggtgttgttattaacaacacatcaggtattaatgctggtggtaaagcgattactaatgtagcagcaccaacaaataacacagatgctgctaacaagaagtatgtagatgatgcaggtacagcattaaccaatttgggctttggattaaaagcacaagatggtacgactgtgaacaagaaattaggtgaagcagttgatattgttggttcaaacagcaacatcagtacaaaagtaaatgcaggcaaagtagaagttgcactatccaatacattggacttaggtactacaggtagcgttactacgggttcaactgtaattaacaatgctggtgttacggcaactcaagttaccgcaaacaaagtcacaataaacaatgcaccaacagcaggtacagatgcgaccaacaagacttatgtagactcaaaagcagcagcatcaagaacagaagtcgcagctggaagcaatgtatctggtgtagtaaaaacgacaggcgcaaacggtcaagatatttatgcagtaaatgccaatggtacgactgcatcagcaggttcttcagcagttaccgtaacaccaggcacgaaagatgcaaataatgtcactgactataaagtagacttgtcagcgactacaaaaaccgatattcaaaaaggtgtagatgcaaaaaatgctgtagatactgcaggtctaaaatttaaaggtgatacagcaaccacaagcaataccaagaaattaggtgacaccgtttcgattacgggtgatacgaacattagtacagttgcaacaactgatggtgtacaggttaagttaaatccaaacttagatttaggagcaactggtagcgttaaaacgggtaataccacgattaacaatgcaggtgtaacagctgaccaagttacggttggtggtgttgttattaacaacacatcaggtattaatgctggtggtaaagcgattaccaatgtagcagcaccaacaaataacacagatgctgctaacaagaagtatgtagatgacgcaggtacagcattaaccaatttgggctttggattaaaagcgcaagatggtacgactgtgaacaagaaattaggtgaagcagttgatattgttggttcaaacagcaacatcagtacaaaagtaaatgcaggcaaagtagaagttgcactatccaatacattggacttaggtactacaggtagcgttactacgggttcaactgtaattaacaatgctggtgttacggcaactcaagttaccgcaaacaaagtcacagttaataatgcaccaacagcaggtacagatgcgaccaataaaacttatgtagactcaaaagcagcggcatcaagaacagaagtcgcagctggaagcaatgtatctggcgtagtaaaaacgacaggtgcaaacggtcaagacgtttatacagtaaatgccaatggtacgactgcatcagcaggttcttcagcagttaccgtaacaccaggcacgaaagatgcaaataatgtcactgactataaagtagacttgtcagcgactacaaaaaccgatattcaaaaaggtgtagatgcaaaaaatgctgtagataccgcaggtctaaaatttaaaggtgatacagcaaccacaagcaataccaagaaattaggtgacaccgtttcgattacgggtgatacgaacattagtacagttgcgacaactgatggtgtacaggttaagctaaatccaaacttggatttaggagcaactggtagcgttaaaacgggtaataccacgattaacaatgcaggtgtaacagctgatcaagttacagttggtggtgttgttattaacaacacatcaggtattaatgctggtggtaaagcgattaccaatgtagcagcaccaacaaataacacagatgctgctaacaagaagtatgtagatgatgcaggtacagcattaaccaatttgggctttggattaaaagcgcaagatggtacgactgtgaacaagaaattaggcgaagcagttgaagttgttggtgcggacagtaacatcaccacgaaagttgcaggcggtcaggttgcaattgagttaaataaaaacctcaacaacttaactggcattaccgtgaacgatggaaccaatggcaccaatggttcaactgtgattggtaaagatggtatttcggttaaagatggttcaggcaataccattgcaggtgtagataacacagcgttgacagttaaagatggcagtggcaacacagaaaccagcattaaccaagcgatcaacacgttaaatgcagcgcaaggtgaaactgataagtttgcagtgaagtacgacaaaaatgctgatggcagtgcaaactataacaatgtcactttagctggtacaaatggcacaataatcagcaatgttaaagcgggtgctgtgacctcaacatctactgatgcgatcaatggtagccaattatatggtgttgcaaacagcgtgaagaatgcaattggtggttcaaccacaattgatgcaacgactggtgcaatcacgacgaccaatattggtggtacaggttcaaatacgattgatggtgcaatcagcagtattaaagattcagcgactaaagcgaaaaccacggtaagtgctggggataatgttgtcgttacatcgggtaccaatgcagatggctcaacaaactatgaagttgcgacagcgaaagacgttaactttgacaaagtgactgtaggtagtgttgttgtagataaatcaagcaatacaatcaaaggattaagtaataccacttggaacggaacagcagtatcaggtcaagcggcgacagaagaccagttaaaaacggtcagcgatgcgcaaggtgaaactgataagtttgcagtgaagtacgacaaaaatgctgatggcagtgcgaactacaacagtattactgcaggcaatggtaacggtactgcagcaacgatcggaactgacacagcaggtaatagtgttgtgaccagtggcggaactaaaattagtaatgttgcgaatggtgtcaatgcaagtgatgcagtaaacaaaggtcaattggatagcttaagtacaggtcttaccaatacaggctttggtttaaaagcagcagatggcaacaccgttaacaaaaaattaggcgaagcagtagacgttgtcggtgctgacagcaacatcaccacgaaagttgcaggcggtcaggttgcgattgagttaaataaaaacctcaacaacttaactggcattaccgtgaacgatggaaccaatggcaccaatggttcaactgtgattggtaaagatggtatttcgattaaagatggttcaggcaataccattgcaggtgtagataacacagcgttgacggttaaagatagcagtggcaacacagaaaccagcattaaccaagcgatcaacacgttaaatgcagcgcaaggtgaaactgataagtttgcagtgaagtacgataagaatgctgatggcagtgtgaactataacaatgtcactttagcaggtacaaatggcacaataatcagaaatgttaaagcgggtgctgtgacctcaacatctactgatgcgatcaatggtagccaattatacgatattgcaaacagcgtgaagaatgcaattggtggttcaaccacaagagatgtaacgactggtgcaatcacaacgaccaatattggtggtacaggttcaaacacgattgatggtgcaatcagcagtattaaagattcagcgactaaagcgaaaaccacgataagtgctggggataatgttgtcgttacatcgggtaccaatgcagatggctcaacaaactatgaagttgcgacagcgaaagacgttaactttgacaaagtaactgtaggtaatgttgttgttgataaggcaaatgacacgatccaaggtttgagcaataaagatctaaattcaactgattttgcgaccaaaggtagagctgcgactgaagaacagttaaaagcagtgattaccagtaatatcacggaagttgtggatggtaatggcaacaaggtgaatattattgaccaagttgtaaataccaaacctgacaataagaaccaagattcattgttcttaacgtatgacaaacaaggtcaagaaaccacagatcgcctaacgattggtcaaacggtacagaagatgaatactgatggtattaaattcttccataccaatgccgatacatcaaaaggtgatttgggtacaacaaatgactcaagtgcaggtggtttaaactctacagcaattggtgtaaatgcgattgttgcgaatggtgcagatagttcagttgctttaggtcataacaccaaagtcaatggtaaacaatcaattgcaattggttctggtgcagaagctttaggcaatcaatcgatcagtattggtacaggcaataaagtcactggtgatcattcgggtgcgattggtgatccaactattgtaaatggtgcaaacagctactctgtgggtaataacaaccaagtacttacagatgacactttcgtacttggaaacaatgtcaccaaaactattgctggttcagtagtattgggtaacggttcagctgcaacgacaggtgctggtgaggcaggctatgccttatctgtagcaacaaatgcagataaagccgcgatcactaaaactacgtcaagcactggtgctgttgcagttggtgatgcgtcgagcggtatttatcgtcaaattaccggtgttgctgcgggtagcgtagattcagatgctgtgaacgttgcacagttaaaagcggtgggtaaccaagttgtaacgactcaaactacattggtgaacagtttgggtggtaacgctaaagtaaatgcagacggtacgattacaggaccaacttataatgttgctcaaggtaatcagaccaatgttggtgatgcattaactgcgcttgataacgcaattaatactgcggcaacaacatctaaatcgactgtttctaatggtcagaatattgttgtcagcaagagcaaaaatgcagatggttcagacaactatgaagtatcaacagcaaaagacttgacagttgattctgtcaaagcgggtgatacggttctgaataatgcaggtattacaattggcaataacgcagttgtattgaacaacactggattaaccattagtggtggaccaagtgttaccttggcaggcatcgatgcaggcaataaaaccattcaaaatgttgcgaatgcagtaaatgcaacagatgcagtcaacaaagggcaattggacagcgcaattaacaatgtgaataacaatgtaaatgagcttgccaacaacgctgttaaatatgacgatgcatcaaaagataagatcacacttggtggtggggcaactggtacaacaatcaccaatgtgaaagatggtactgttgcgcaaggttctaaagatgctgtgaatggcggtcaattgtggaatgttcaacaacaagttgatcagaacacaactgatattagcaatatcaaaaatgatattaacaacggtactgttggtttggttcaacaagcaggtaaagatgcaccagtgacggttgcaaaagatactggcggtacaacggtgaatgtcgctggaacagatggcaaccgagtagtgacaggtgttaaggaaggtgcagtgaatgcaacatctaaagatgctgtcaatggtagtcaattgaatacaaccaaccaagcggtagtcaattatcttggtggtggggcaggttatgacaacattacaggtagcttcacagcgccaagttatacggtaggtgactcgaaatacaacaatgttggtggcgcaattgatgcattgaatcaagcagatcaagcattgaatagcaaaattgacaatgtcagtaacaagttggataacgcattccgtattaccaacaaccgtattgatgatgtagagaaaaaagccaatgctggtattgccgctgcgatggctctggaatcagcaccatatgtcccaggtaaatatacctatgcagcaggcgcagcttaccacggtggtgaaaatgcggtaggtgtgactttacgtaaaactgcagacaatggtcgttggtcgattacaggcggtgtagctgcagcgtctcaaggcgatgcaagtgttcgtatcggtatcagcggtgtgattgactaa

SEQ ID NO: 13 - protein, 2632 aa, artificial sequence
  Synthetic Construct
MNKIYKVIWNATLLAWVAVSELAKGKTKSTTSKSKAKSLSSSVIVGGIILTTPLSLIAATVQVGGGTNSGTTATASTNCADLYNYQNPENSGSGAAGNYNAGNPSVCSIAIGENAQGGTSGTGGSPGIAIGGNSKATGGLSVAIGGYAQATNVGSIALGTAALSSGFNSLAISRQAAATNNYSIAIGTTSVSKGVGSIAMGHSTNASGDQSIAIGSSDAVNSATATTTYDGTTNTQASGSKSIAIGASAKASTNNSIALGAGSVTSAQSGNSYLTGVGASATNGVVSVGTSTATRRIQNVADGSAASDAVTVAQLDKAYDDTNGRLAAALGTGSGAAYNAANNTYTAPTNIGGTGKNTIDDAIKATQRSVVAGSNIVVTPTTASDGSISYSVATSATPTFTSITVNNAPTAGTDATNKTYVDSKAAASRTEVAAGSNVSGVVKTTGANGQDVYTVNANGTTASAGSSAVTVTPGTKDANNVTDYKVDLSATTKTDIQKGVDAKNAVDTAGLKFKGDTATTSNTKKLGDTVSITGDTNISTVATTDGVQVKLNPNLDLGATGSVKTGNTTINNAGVTADQVTVGGVVINNTSGINAGGKAITNVAAPTNNTDAANKKYVDDAGTALTNLGFGLKAQDGTTVNKKLGEAVDIVGSNSNISTKVNAGKVEVALSNTLDLGTTGSVTTGSTVINNAGVTATQVTANKVTINNAPTAGTDATNKTYVDSKAAASRTEVAAGSNVSGVVKTTGANGQDIYAVNANGTTASAGSSAVTVTPGTKDANNVTDYKVDLSATTKTDIQKGVDAKNAVDTAGLKFKGDTATTSNTKKLGDTVSITGDTNISTVATTDGVQVKLNPNLDLGATGSVKTGNTTINNAGVTADQVTVGGVVINNTSGINAGGKAITNVAAPTNNTDAANKKYVDDAGTALTNLGFGLKAQDGTTVNKKLGEAVDIVGSNSNISTKVNAGKVEVALSNTLDLGTTGSVTTGSTVINNAGVTATQVTANKVTVNNAPTAGTDATNKTYVDSKAAASRTEVAAGSNVSGVVKTTGANGQDVYTVNANGTTASAGSSAVTVTPGTKDANNVTDYKVDLSATTKTDIQKGVDAKNAVDTAGLKFKGDTATTSNTKKLGDTVSITGDTNISTVATTDGVQVKLNPNLDLGATGSVKTGNTTINNAGVTADQVTVGGVVINNTSGINAGGKAITNVAAPTNNTDAANKKYVDDAGTALTNLGFGLKAQDGTTVNKKLGEAVEVVGADSNITTKVAGGQVAIELNKNLNNLTGITVNDGTNGTNGSTVIGKDGISVKDGSGNTIAGVDNTALTVKDGSGNTETSINQAINTLNAAQGETDKFAVKYDKNADGSANYNNVTLAGTNGTIISNVKAGAVTSTSTDAINGSQLYGVANSVKNAIGGSTTIDATTGAITTTNIGGTGSNTIDGAISSIKDSATKAKTTVSAGDNVVVTSGTNADGSTNYEVATAKDVNFDKVTVGSVVVDKSSNTIKGLSNTTWNGTAVSGQAATEDQLKTVSDAQGETDKFAVKYDKNADGSANYNSITAGNGNGTAATIGTDTAGNSVVTSGGTKISNVANGVNASDAVNKGQLDSLSTGLTNTGFGLKAADGNTVNKKLGEAVDVVGADSNITTKVAGGQVAIELNKNLNNLTGITVNDGTNGTNGSTVIGKDGISIKDGSGNTIAGVDNTALTVKDSSGNTETSINQAINTLNAAQGETDKFAVKYDKNADGSVNYNNVTLAGTNGTIIRNVKAGAVTSTSTDAINGSQLYDIANSVKNAIGGSTTRDVTTGAITTTNIGGTGSNTIDGAISSIKDSATKAKTTISAGDNVVVTSGTNADGSTNYEVATAKDVNFDKVTVGNVVVDKANDTIQGLSNKDLNSTDFATKGRAATEEQLKAVITSNITEVVDGNGNKVNIIDQVVNTKPDNKNQDSLFLTYDKQGQETTDRLTIGQTVQKMNTDGIKFFHTNADTSKGDLGTTNDSSAGGLNSTAIGVNAIVANGADSSVALGHNTKVNGKQSIAIGSGAEALGNQSISIGTGNKVTGDHSGAIGDPTIVNGANSYSVGNNNQVLTDDTFVLGNNVTKTIAGSVVLGNGSAATTGAGEAGYALSVATNADKAAITKTTSSTGAVAVGDASSGIYRQITGVAAGSVDSDAVNVAQLKAVGNQVVTTQTTLVNSLGGNAKVNADGTITGPTYNVAQGNQTNVGDALTALDNAINTAATTSKSTVSNGQNIVVSKSKNADGSDNYEVSTAKDLTVDSVKAGDTVLNNAGITIGNNAVVLNNTGLTISGGPSVTLAGIDAGNKTIQNVANAVNATDAVNKGQLDSAINNVNNNVNELANNAVKYDDASKDKITLGGGATGTTITNVKDGTVAQGSKDAVNGGQLWNVQQQVDQNTTDISNIKNDINNGTVGLVQQAGKDAPVTVAKDTGGTTVNVAGTDGNRVVTGVKEGAVNATSKDAVNGSQLNTTNQAVVNYLGGGAGYDNITGSFTAPSYTVGDSKYNNVGGAIDALNQADQALNSKIDNVSNKLDNAFRITNNRIDDVEKKANAGIAAAMALESAPYVPGKYTYAAGAAYHGGENAVGVTLRKTADNGRWSITGGVAAASQGDASVRIGISGVID

SEQ ID NO: 14 - DNA, 8574 bp, artificial sequence
  AtaA lacking a portion of Nstalk and Chead
  CDS (1)..(8574)
atgaataaaatctacaaagtgatttggaatgcgactttgttggcatgggttgcagtatctgaattggcaaaagggaaaaccaaatctacgacatcaaaatccaaagctaaatcattatcttcatctgtaatagttggtgggataatattaacaacacctttatctttaatagcagctactgttcaagttggagggggaactaattctggaacaactgctacagcttctacgaattgtgcagacttatataattatcaaaatcctgagaactcaggctctggagcggctgggaattataatgcaggaaatccaagtgtgtgttcgatcgctataggtgaaaacgcacaaggtggtacttctggaactggagggtcgccagggatagcgataggtggaaattctaaagctacgggtggtttatctgttgctataggcggatatgctcaagcgacaaatgttggaagtattgctttaggcacagcagctttatcaagtggttttaacagtttagcaatatccagacaagctgctgcaacgaataactattcaatagctataggtacaacttcagtttcgaaaggagttggatcgattgctatggggcattcaacgaatgcttctggagatcaatcgatagcaattggtagctcggatgctgttaattcagcaacagcaacaacaacatacgatggtacaacaaatactcaagcatcaggtagtaaatcgattgctataggtgcaagcgcaaaggcatcaaccaataacagcattgcactaggtgcaggatcggtaacttctgcacaatctggtaattcttatcttactggtgtaggtgcatcagctacaaatggtgttgtatctgttggaacttcaactgcaacacgtcgtatccaaaatgtagcagatggttcagccgcttcagatgctgtgacagttgctcagttggataaagcttatgatgatacaaatggtcgtttagctgctgctttaggtacaggtagtggtgctgcctataatgcagcaaacaatacatataccgctccaacgaatattgggggaacaggtaaaaatacgattgatgatgcaattaaagcaactcaacgaagtgtagtcgctggatcaaatattgtcgttaccccgacgacagcttctgatggttcaatatcgtattcggttgctacaagcgcaacaccgacgtttacaagtataactgtaaacaatgcaccaacggcaggtacagatgcgaccaacaagacttatgtagactcaaaagcagcagcatcgagaacagaagtagcagctggaagcaatgtatctggtgtagtaaaaacgacaggcgcaaacggtcaagacgtttatacagtaaatgccaatggtacgactgcatcagcaggttcttcagcagttaccgtaacaccaggcacgaaagatgcaaataatgtcactgactataaagtagacttatcagcgactacaaaaaccgatatccaaaaaggtgtagatgcaaaaaatgctgtagataccgcaggtctaaaatttaaaggtgatacagcaaccacaagcaataccaagaaattaggtgacaccgtttcgattacgggtgatacgaacattagtacagttgcgacaacagatggtgtacaggttaagttaaatccaaacttggatttaggagcaactggtagcgttaaaacgggtaataccacgattaacaatgcaggtgtaacagctgatcaagttacggttggtggtgttgttattaacaacacatcaggtattaatgctggtggtaaagcgattactaatgtagcagcaccaacaaataacacagatgctgctaacaagaagtatgtagatgatgcaggtacagcattaaccaatttgggctttggattaaaagcacaagatggtacgactgtgaacaagaaattaggtgaagcagttgatattgttggttcaaacagcaacatcagtacaaaagtaaatgcaggcaaagtagaagttgcactatccaatacattggacttaggtactacaggtagcgttactacgggttcaactgtaattaacaatgctggtgttacggcaactcaagttaccgcaaacaaagtcacaataaacaatgcaccaacagcaggtacagatgcgaccaacaagacttatgtagactcaaaagcagcagcatcaagaacagaagtcgcagctggaagcaatgtatctggtgtagtaaaaacgacaggcgcaaacggtcaagatatttatgcagtaaatgccaatggtacgactgcatcagcaggttcttcagcagttaccgtaacaccaggcacgaaagatgcaaataatgtcactgactataaagtagacttgtcagcgactacaaaaaccgatattcaaaaaggtgtagatgcaaaaaatgctgtagatactgcaggtctaaaatttaaaggtgatacagcaaccacaagcaataccaagaaattaggtgacaccgtttcgattacgggtgatacgaacattagtacagttgcaacaactgatggtgtacaggttaagttaaatccaaacttagatttaggagcaactggtagcgttaaaacgggtaataccacgattaacaatgcaggtgtaacagctgaccaagttacggttggtggtgttgttattaacaacacatcaggtattaatgctggtggtaaagcgattaccaatgtagcagcaccaacaaataacacagatgctgctaacaagaagtatgtagatgacgcaggtacagcattaaccaatttgggctttggattaaaagcgcaagatggtacgactgtgaacaagaaattaggtgaagcagttgatattgttggttcaaacagcaacatcagtacaaaagtaaatgcaggcaaagtagaagttgcactatccaatacattggacttaggtactacaggtagcgttactacgggttcaactgtaattaacaatgctggtgttacggcaactcaagttaccgcaaacaaagtcacagttaataatgcaccaacagcaggtacagatgcgaccaataaaacttatgtagactcaaaagcagcggcatcaagaacagaagtcgcagctggaagcaatgtatctggcgtagtaaaaacgacaggtgcaaacggtcaagacgtttatacagtaaatgccaatggtacgactgcatcagcaggttcttcagcagttaccgtaacaccaggcacgaaagatgcaaataatgtcactgactataaagtagacttgtcagcgactacaaaaaccgatattcaaaaaggtgtagatgcaaaaaatgctgtagataccgcaggtctaaaatttaaaggtgatacagcaaccacaagcaataccaagaaattaggtgacaccgtttcgattacgggtgatacgaacattagtacagttgcgacaactgatggtgtacaggttaagctaaatccaaacttggatttaggagcaactggtagcgttaaaacgggtaataccacgattaacaatgcaggtgtaacagctgatcaagttacagttggtggtgttgttattaacaacacatcaggtattaatgctggtggtaaagcgattaccaatgtagcagcaccaacaaataacacagatgctgctaacaagaagtatgtagatgatgcaggtacagcattaaccaatttgggctttggattaaaagcgcaagatggtacgactgtgaacaagaaattaggcgaagcagttgaagttgttggtgcggacagtaacatcaccacgaaagttgcaggcggtcaggttgcaattgagttaaataaaaacctcaacaacttaactggcattaccgtgaacgatggaaccaatggcaccaatggttcaactgtgattggtaaagatggtatttcggttaaagatggttcaggcaataccattgcaggtgtagataacacagcgttgacagttaaagatggcagtggcaacacagaaaccagcattaaccaagcgatcaacacgttaaatgcagcgcaaggtgaaactgataagtttgcagtgaagtacgacaaaaatgctgatggcagtgtgaactacaacaacatcacattggcaggtacgactgcaagcagtacacaagatgcaactacaggcaagatcaccacaacaggtggaacaagcttgaacaatgttgcaagtgcgggtgactacaaagatgttgccaatgcaagcaaaggtgtaaacgcaggtgacttaaacaatgcagttgttgatgcaaccaatgcagcaaccagcaaaggctttgcattacaagcagcagatggcgctaaagttcagaagaacctaggcgaagcagttgaagttgtcggtgccgacagcaacatcaccacaaaagttgcaggcggtcaggttgcaattgagttaaataaaaacctcaacaacttaactggcattaccgtgaacgatggaaccaatggcaccaatggttcaactgtgattggtaaagatggtatttcagttaaagacggttcaggcaataccattgcaggtgtagataacacagcgttgacagttaaagatggcagtggcaacacagaaaccagcattaaccaagcgatcaacacgttaaatgcagcgcaaggtgaaactgataagtttgcagtgaagtacgacaaaaatacggatggtagtaccaactacaacagtattactgcaggcaatggtaacggtactgcagcaacgatcggaactgacacagcaggtaatagtgttgtgaccagtggcggaactaaaattagtaatgttgcgaatggtgtcaatgcaagtgatgcagtaaacaaaggtcaattggatagcttaagtacaggtcttaccaatacaggctttggtttaaaagcagcagatggcaacaccgttaacaaaaaattaggcgaagcagtagacgttgtcggtgctgacagcaacatcaccacgaaagttgcaggcggtcaggttgcgattgagttaaataaaaacctcaacaacttaactggcattaccgtgaacgatggaaccaatggcaccaatggttcaactgtgattggtaaagatggtatttcgattaaagatggttcaggcaataccattgcaggtgtagataacacagcgttgacagttaaagatggcagtggcaacacagaaaccagcattaaccaagcgatcaacacgttaaatgcagcgcaaggtgaaactgacaagtttgcagtgaagtacgacaagaatgctgatggcagtgcaaactacaacaacatcacattggcaggtacgactgcaagtagcacgcaagatgcaacaacaggcaagatcaccacaacaggtggaacaagcttgaacaacgttgcaagtgcaggtgactacaaagatgttgccaatgcaagcaaaggtgtaaacgcaggtgacttgaacaatgcagttgttgatgcaaccaatgcagcaaccagcaaaggctttgcattacaagcagcagatggcgctaaagttcagaagaacctaggcgaagcagttgaagttgtcggtgcggacagcaacatcaccacaaaagtagtgggtggacaagttgcgattgagttaaataaaaacctcaacaacttaactggcattaccgtgaacgatggaaccaatggcacaaatggttcaactgtgattggtaaagatggtatttcggttaaagatggttcaggtaataccattgcaggtgtagataacacagcgttgacagttaaagatggcagtggcaacacagaaaccagcattaaccaagcgatcaacacgttaaatgcagcgcaaggtgaaactgataagtttgcagtgaagtacgacaaaaatgctgatggcagtgtgaactacaacaacatcacattggcaggtacgactgcaagcagtacacaagatgcaactacaggcaagatcaccacaacaggtggaacaagcttgaacaatgttgcaagtgcgggtgactacaaagatgttgccaatgcaagcaaaggtgtaaacgcaggtgacttaaacaatgcagttgttgatgcaaccaatgcagcaaccagcaaaggctttgcattacaagcagcagatggcgctaaagttcagaagaacctaggcgaagcagttgaagttgtcggtgccgacagcaacatcaccacaaaagttgcaggcggtcaggttgcaattgagttaaataaaaacctcaacaacttaactggcattaccgtgaacgatggaaccaatggcaccaatggttcaactgtgattggtaaagatggtatttcagttaaagacggttcaggcaataccattgcaggtgtagataacacagcgttgacagttaaagatggcagtggcaacacagaaaccagcattaaccaagcgatcaacacgttaaatgcagcgcaaggtgaaactgataagtttgcagtgaagtacgacaaaaatgctgatggcagtgtgaactacaacaacatcacattggcaggtacgactgcaagcagtacacaagatgcaactacaggcaagatcaccacaacaggtggtacaagcttgaacaatgttgcaagtgcgggtgactacaaagatgttgccaatgcaagcaaaggtgtaaacgcaggtgacttgaacaatgcagttgttgatgcaaccaatgcagcgaccagcaaaggctttgcattacaagcagcagatggcgctaaagttcagaagaacctaggcgaagcagttgaagttgttggtgcggacagtaacatcaccacgaaagttgcaggcggtcaggttgcaattgagttaaataaaaacctcaacaacttaactggcattaccgtgaacgatggaaccaatggcaccaatggttcaactgtgattggtaaagatggtatttcggttaaagatggttcaggcaataccattgcaggtgtagataacacagcgttgacagttaaagatggcagtggcaacacagaaaccagcattaaccaagcgatcaacacgttaaatgcagcgcaaggtgaaactgataagtttgcagtgaagtacgacaaaaatgctgatggcagtgcaaactataacaatgtcactttagctggtacaaatggcacaataatcagcaatgttaaagcgggtgctgtgacctcaacatctactgatgcgatcaatggtagccaattaaaagcggtgggtaaccaagttgtaacgactcaaactacattggtgaacagtttgggtggtaacgctaaagtaaatgcagacggtacgattacaggaccaacttataatgttgctcaaggtaatcagaccaatgttggtgatgcattaactgcgcttgataacgcaattaatactgcggcaacaacatctaaatcgactgtttctaatggtcagaatattgttgtcagcaagagcaaaaatgcagatggttcagacaactatgaagtatcaacagcaaaagacttgacagttgattctgtcaaagcgggtgatacggttctgaataatgcaggtattacaattggcaataacgcagttgtattgaacaacactggattaaccattagtggtggaccaagtgttaccttggcaggcatcgatgcaggcaataaaaccattcaaaatgttgcgaatgcagtaaatgcaacagatgcagtcaacaaagggcaattggacagcgcaattaacaatgtgaataacaatgtaaatgagcttgccaacaacgctgttaaatatgacgatgcatcaaaagataagatcacacttggtggtggggcaactggtacaacaatcaccaatgtgaaagatggtactgttgcgcaaggttctaaagatgctgtgaatggcggtcaattgtggaatgttcaacaacaagttgatcagaacacaactgatattagcaatatcaaaaatgatattaacaacggtactgttggtttggttcaacaagcaggtaaagatgcaccagtgacggttgcaaaagatactggcggtacaacggtgaatgtcgctggaacagatggcaaccgagtagtgacaggtgttaaggaaggtgcagtgaatgcaacatctaaagatgctgtcaatggtagtcaattgaatacaaccaaccaagcggtagtcaattatcttggtggtggggcaggttatgacaacattacaggtagcttcacagcgccaagttatacggtaggtgactcgaaatacaacaatgttggtggcgcaattgatgcattgaatcaagcagatcaagcattgaatagcaaaattgacaatgtcagtaacaagttggataacgcattccgtattaccaacaaccgtattgatgatgtagagaaaaaagccaatgctggtattgccgctgcgatggctctggaatcagcaccatatgtcccaggtaaatatacctatgcagcaggcgcagcttaccacggtggtgaaaatgcggtaggtgtgactttacgtaaaactgcagacaatggtcgttggtcgattacaggcggtgtagctgcagcgtctcaaggcgatgcaagtgttcgtatcggtatcagcggtgtgattgactaa

SEQ ID NO: 15 - protein, 2857 aa, artificial sequence
  Synthetic Construct
MNKIYKVIWNATLLAWVAVSELAKGKTKSTTSKSKAKSLSSSVIVGGIILTTPLSLIAATVQVGGGTNSGTTATASTNCADLYNYQNPENSGSGAAGNYNAGNPSVCSIAIGENAQGGTSGTGGSPGIAIGGNSKATGGLSVAIGGYAQATNVGSIALGTAALSSGFNSLAISRQAAATNNYSIAIGTTSVSKGVGSIAMGHSTNASGDQSIAIGSSDAVNSATATTTYDGTTNTQASGSKSIAIGASAKASTNNSIALGAGSVTSAQSGNSYLTGVGASATNGVVSVGTSTATRRIQNVADGSAASDAVTVAQLDKAYDDTNGRLAAALGTGSGAAYNAANNTYTAPTNIGGTGKNTIDDAIKATQRSVVAGSNIVVTPTTASDGSISYSVATSATPTFTSITVNNAPTAGTDATNKTYVDSKAAASRTEVAAGSNVSGVVKTTGANGQDVYTVNANGTTASAGSSAVTVTPGTKDANNVTDYKVDLSATTKTDIQKGVDAKNAVDTAGLKFKGDTATTSNTKKLGDTVSITGDTNISTVATTDGVQVKLNPNLDLGATGSVKTGNTTINNAGVTADQVTVGGVVINNTSGINAGGKAITNVAAPTNNTDAANKKYVDDAGTALTNLGFGLKAQDGTTVNKKLGEAVDIVGSNSNISTKVNAGKVEVALSNTLDLGTTGSVTTGSTVINNAGVTATQVTANKVTINNAPTAGTDATNKTYVDSKAAASRTEVAAGSNVSGVVKTTGANGQDIYAVNANGTTASAGSSAVTVTPGTKDANNVTDYKVDLSATTKTDIQKGVDAKNAVDTAGLKFKGDTATTSNTKKLGDTVSITGDTNISTVATTDGVQVKLNPNLDLGATGSVKTGNTTINNAGVTADQVTVGGVVINNTSGINAGGKAITNVAAPTNNTDAANKKYVDDAGTALTNLGFGLKAQDGTTVNKKLGEAVDIVGSNSNISTKVNAGKVEVALSNTLDLGTTGSVTTGSTVINNAGVTATQVTANKVTVNNAPTAGTDATNKTYVDSKAAASRTEVAAGSNVSGVVKTTGANGQDVYTVNANGTTASAGSSAVTVTPGTKDANNVTDYKVDLSATTKTDIQKGVDAKNAVDTAGLKFKGDTATTSNTKKLGDTVSITGDTNISTVATTDGVQVKLNPNLDLGATGSVKTGNTTINNAGVTADQVTVGGVVINNTSGINAGGKAITNVAAPTNNTDAANKKYVDDAGTALTNLGFGLKAQDGTTVNKKLGEAVEVVGADSNITTKVAGGQVAIELNKNLNNLTGITVNDGTNGTNGSTVIGKDGISVKDGSGNTIAGVDNTALTVKDGSGNTETSINQAINTLNAAQGETDKFAVKYDKNADGSVNYNNITLAGTTASSTQDATTGKITTTGGTSLNNVASAGDYKDVANASKGVNAGDLNNAVVDATNAATSKGFALQAADGAKVQKNLGEAVEVVGADSNITTKVAGGQVAIELNKNLNNLTGITVNDGTNGTNGSTVIGKDGISVKDGSGNTIAGVDNTALTVKDGSGNTETSINQAINTLNAAQGETDKFAVKYDKNTDGSTNYNSITAGNGNGTAATIGTDTAGNSVVTSGGTKISNVANGVNASDAVNKGQLDSLSTGLTNTGFGLKAADGNTVNKKLGEAVDVVGADSNITTKVAGGQVAIELNKNLNNLTGITVNDGTNGTNGSTVIGKDGISIKDGSGNTIAGVDNTALTVKDGSGNTETSINQAINTLNAAQGETDKFAVKYDKNADGSANYNNITLAGTTASSTQDATTGKITTTGGTSLNNVASAGDYKDVANASKGVNAGDLNNAVVDATNAATSKGFALQAADGAKVQKNLGEAVEVVGADSNITTKVVGGQVAIELNKNLNNLTGITVNDGTNGTNGSTVIGKDGISVKDGSGNTIAGVDNTALTVKDGSGNTETSINQAINTLNAAQGETDKFAVKYDKNADGSVNYNNITLAGTTASSTQDATTGKITTTGGTSLNNVASAGDYKDVANASKGVNAGDLNNAVVDATNAATSKGFALQAADGAKVQKNLGEAVEVVGADSNITTKVAGGQVAIELNKNLNNLTGITVNDGTNGTNGSTVIGKDGISVKDGSGNTIAGVDNTALTVKDGSGNTETSINQAINTLNAAQGETDKFAVKYDKNADGSVNYNNITLAGTTASSTQDATTGKITTTGGTSLNNVASAGDYKDVANASKGVNAGDLNNAVVDATNAATSKGFALQAADGAKVQKNLGEAVEVVGADSNITTKVAGGQVAIELNKNLNNLTGITVNDGTNGTNGSTVIGKDGISVKDGSGNTIAGVDNTALTVKDGSGNTETSINQAINTLNAAQGETDKFAVKYDKNADGSANYNNVTLAGTNGTIISNVKAGAVTSTSTDAINGSQLKAVGNQVVTTQTTLVNSLGGNAKVNADGTITGPTYNVAQGNQTNVGDALTALDNAINTAATTSKSTVSNGQNIVVSKSKNADGSDNYEVSTAKDLTVDSVKAGDTVLNNAGITIGNNAVVLNNTGLTISGGPSVTLAGIDAGNKTIQNVANAVNATDAVNKGQLDSAINNVNNNVNELANNAVKYDDASKDKITLGGGATGTTITNVKDGTVAQGSKDAVNGGQLWNVQQQVDQNTTDISNIKNDINNGTVGLVQQAGKDAPVTVAKDTGGTTVNVAGTDGNRVVTGVKEGAVNATSKDAVNGSQLNTTNQAVVNYLGGGAGYDNITGSFTAPSYTVGDSKYNNVGGAIDALNQADQALNSKIDNVSNKLDNAFRITNNRIDDVEKKANAGIAAAMALESAPYVPGKYTYAAGAAYHGGENAVGVTLRKTADNGRWSITGGVAAASQGDASVRIGISGVID

SEQ ID NO: 16 - DNA, 9975 bp, artificial sequence
  AtaA lacking almost all Cstalk
  CDS (1)..(9975)
atgaataaaatctacaaagtgatttggaatgcgactttgttggcatgggttgcagtatctgaattggcaaaagggaaaaccaaatctacgacatcaaaatccaaagctaaatcattatcttcatctgtaatagttggtgggataatattaacaacacctttatctttaatagcagctactgttcaagttggagggggaactaattctggaacaactgctacagcttctacgaattgtgcagacttatataattatcaaaatcctgagaactcaggctctggagcggctgggaattataatgcaggaaatccaagtgtgtgttcgatcgctataggtgaaaacgcacaaggtggtacttctggaactggagggtcgccagggatagcgataggtggaaattctaaagctacgggtggtttatctgttgctataggcggatatgctcaagcgacaaatgttggaagtattgctttaggcacagcagctttatcaagtggttttaacagtttagcaatatccagacaagctgctgcaacgaataactattcaatagctataggtacaacttcagtttcgaaaggagttggatcgattgctatggggcattcaacgaatgcttctggagatcaatcgatagcaattggtagctcggatgctgttaattcagcaacagcaacaacaacatacgatggtacaacaaatactcaagcatcaggtagtaaatcgattgctataggtgcaagcgcaaaggcatcaaccaataacagcattgcactaggtgcaggatcggtaacttctgcacaatctggtaattcttatcttactggtgtaggtgcatcagctacaaatggtgttgtatctgttggaacttcaactgcaacacgtcgtatccaaaatgtagcagatggttcagccgcttcagatgctgtgacagttgctcagttggataaagcttatgatgatacaaatggtcgtttagctgctgctttaggtacaggtagtggtgctgcctataatgcagcaaacaatacatataccgctccaacgaatattgggggaacaggtaaaaatacgattgatgatgcaattaaagcaactcaacgaagtgtagtcgctggatcaaatattgtcgttaccccgacgacagcttctgatggttcaatatcgtattcggttgctacaagcgcaacaccgacgtttacaagtataactgtaaacaatgcaccaacggcaggtacagatgcgaccaacaagacttatgtagactcaaaagcagcagcatcgagaacagaagtagcagctggaagcaatgtatctggtgtagtaaaaacgacaggcgcaaacggtcaagacgtttatacagtaaatgccaatggtacgactgcatcagcaggttcttcagcagttaccgtaacaccaggcacgaaagatgcaaataatgtcactgactataaagtagacttatcagcgactacaaaaaccgatatccaaaaaggtgtagatgcaaaaaatgctgtagataccgcaggtctaaaatttaaaggtgatacagcaaccacaagcaataccaagaaattaggtgacaccgtttcgattacgggtgatacgaacattagtacagttgcgacaacagatggtgtacaggttaagttaaatccaaacttggatttaggagcaactggtagcgttaaaacgggtaataccacgattaacaatgcaggtgtaacagctgatcaagttacggttggtggtgttgttattaacaacacatcaggtattaatgctggtggtaaagcgattactaatgtagcagcaccaacaaataacacagatgctgctaacaagaagtatgtagatgatgcaggtacagcattaaccaatttgggctttggattaaaagcacaagatggtacgactgtgaacaagaaattaggtgaagcagttgatattgttggttcaaacagcaacatcagtacaaaagtaaatgcaggcaaagtagaagttgcactatccaatacattggacttaggtactacaggtagcgttactacgggttcaactgtaattaacaatgctggtgttacggcaactcaagttaccgcaaacaaagtcacaataaacaatgcaccaacagcaggtacagatgcgaccaacaagacttatgtagactcaaaagcagcagcatcaagaacagaagtcgcagctggaagcaatgtatctggtgtagtaaaaacgacaggcgcaaacggtcaagatatttatgcagtaaatgccaatggtacgactgcatcagcaggttcttcagcagttaccgtaacaccaggcacgaaagatgcaaataatgtcactgactataaagtagacttgtcagcgactacaaaaaccgatattcaaaaaggtgtagatgcaaaaaatgctgtagatactgcaggtctaaaatttaaaggtgatacagcaaccacaagcaataccaagaaattaggtgacaccgtttcgattacgggtgatacgaacattagtacagttgcaacaactgatggtgtacaggttaagttaaatccaaacttagatttaggagcaactggtagcgttaaaacgggtaataccacgattaacaatgcaggtgtaacagctgaccaagttacggttggtggtgttgttattaacaacacatcaggtattaatgctggtggtaaagcgattaccaatgtagcagcaccaacaaataacacagatgctgctaacaagaagtatgtagatgacgcaggtacagcattaaccaatttgggctttggattaaaagcgcaagatggtacgactgtgaacaagaaattaggtgaagcagttgatattgttggttcaaacagcaacatcagtacaaaagtaaatgcaggcaaagtagaagttgcactatccaatacattggacttaggtactacaggtagcgttactacgggttcaactgtaattaacaatgctggtgttacggcaactcaagttaccgcaaacaaagtcacagttaataatgcaccaacagcaggtacagatgcgaccaataaaacttatgtagactcaaaagcagcggcatcaagaacagaagtcgcagctggaagcaatgtatctggcgtagtaaaaacgacaggtgcaaacggtcaagacgtttatacagtaaatgccaatggtacgactgcatcagcaggttcttcagcagttaccgtaacaccaggcacgaaagatgcaaataatgtcactgactataaagtagacttgtcagcgactacaaaaaccgatattcaaaaaggtgtagatgcaaaaaatgctgtagataccgcaggtctaaaatttaaaggtgatacagcaaccacaagcaataccaagaaattaggtgacaccgtttcgattacgggtgatacgaacattagtacagttgcgacaactgatggtgtacaggttaagctaaatccaaacttggatttaggagcaactggtagcgttaaaacgggtaataccacgattaacaatgcaggtgtaacagctgatcaagttacagttggtggtgttgttattaacaacacatcaggtattaatgctggtggtaaagcgattaccaatgtagcagcaccaacaaataacacagatgctgctaacaagaagtatgtagatgatgcaggtacagcattaaccaatttgggctttggattaaaagcgcaagatggtacgactgtgaacaagaaattaggcgaagcagttgaagttgttggtgcggacagtaacatcaccacgaaagttgcaggcggtcaggttgcaattgagttaaataaaaacctcaacaacttaactggcattaccgtgaacgatggaaccaatggcaccaatggttcaactgtgattggtaaagatggtatttcggttaaagatggttcaggcaataccattgcaggtgtagataacacagcgttgacagttaaagatggcagtggcaacacagaaaccagcattaaccaagcgatcaacacgttaaatgcagcgcaaggtgaaactgataagtttgcagtgaagtacgacaaaaatgctgatggcagtgtgaactacaacaacatcacattggcaggtacgactgcaagcagtacacaagatgcaactacaggcaagatcaccacaacaggtggaacaagcttgaacaatgttgcaagtgcgggtgactacaaagatgttgccaatgcaagcaaaggtgtaaacgcaggtgacttaaacaatgcagttgttgatgcaaccaatgcagcaaccagcaaaggctttgcattacaagcagcagatggcgctaaagttcagaagaacctaggcgaagcagttgaagttgtcggtgccgacagcaacatcaccacaaaagttgcaggcggtcaggttgcaattgagttaaataaaaacctcaacaacttaactggcattaccgtgaacgatggaaccaatggcaccaatggttcaactgtgattggtaaagatggtatttcagttaaagacggttcaggcaataccattgcaggtgtagataacacagcgttgacagttaaagatggcagtggcaacacagaaaccagcattaaccaagcgatcaacacgttaaatgcagcgcaaggtgaaactgataagtttgcagtgaagtacgacaaaaatacggatggtagtaccaactacaacagtattactgcaggcaatggtaacggtactgcagcaacgatcggaactgacacagcaggtaatagtgttgtgaccagtggcggaactaaaattagtaatgttgcgaatggtgtcaatgcaagtgatgcagtaaacaaaggtcaattggatagcttaagtacaggtcttaccaatacaggctttggtttaaaagcagcagatggcaacaccgttaacaaaaaattaggcgaagcagtagacgttgtcggtgctgacagcaacatcaccacgaaagttgcaggcggtcaggttgcgattgagttaaataaaaacctcaacaacttaactggcattaccgtgaacgatggaaccaatggcaccaatggttcaactgtgattggtaaagatggtatttcgattaaagatggttcaggcaataccattgcaggtgtagataacacagcgttgacagttaaagatggcagtggcaacacagaaaccagcattaaccaagcgatcaacacgttaaatgcagcgcaaggtgaaactgacaagtttgcagtgaagtacgacaagaatgctgatggcagtgcaaactacaacaacatcacattggcaggtacgactgcaagtagcacgcaagatgcaacaacaggcaagatcaccacaacaggtggaacaagcttgaacaacgttgcaagtgcaggtgactacaaagatgttgccaatgcaagcaaaggtgtaaacgcaggtgacttgaacaatgcagttgttgatgcaaccaatgcagcaaccagcaaaggctttgcattacaagcagcagatggcgctaaagttcagaagaacctaggcgaagcagttgaagttgtcggtgcggacagcaacatcaccacaaaagtagtgggtggacaagttgcgattgagttaaataaaaacctcaacaacttaactggcattaccgtgaacgatggaaccaatggcacaaatggttcaactgtgattggtaaagatggtatttcggttaaagatggttcaggtaataccattgcaggtgtagataacacagcgttgacagttaaagatggcagtggcaacacagaaaccagcattaaccaagcgatcaacacgttaaatgcagcgcaaggtgaaactgataagtttgcagtgaagtacgacaaaaatgctgatggcagtgtgaactacaacaacatcacattggcaggtacgactgcaagcagtacacaagatgcaactacaggcaagatcaccacaacaggtggaacaagcttgaacaatgttgcaagtgcgggtgactacaaagatgttgccaatgcaagcaaaggtgtaaacgcaggtgacttaaacaatgcagttgttgatgcaaccaatgcagcaaccagcaaaggctttgcattacaagcagcagatggcgctaaagttcagaagaacctaggcgaagcagttgaagttgtcggtgccgacagcaacatcaccacaaaagttgcaggcggtcaggttgcaattgagttaaataaaaacctcaacaacttaactggcattaccgtgaacgatggaaccaatggcaccaatggttcaactgtgattggtaaagatggtatttcagttaaagacggttcaggcaataccattgcaggtgtagataacacagcgttgacagttaaagatggcagtggcaacacagaaaccagcattaaccaagcgatcaacacgttaaatgcagcgcaaggtgaaactgataagtttgcagtgaagtacgacaaaaatgctgatggcagtgtgaactacaacaacatcacattggcaggtacgactgcaagcagtacacaagatgcaactacaggcaagatcaccacaacaggtggtacaagcttgaacaatgttgcaagtgcgggtgactacaaagatgttgccaatgcaagcaaaggtgtaaacgcaggtgacttgaacaatgcagttgttgatgcaaccaatgcagcgaccagcaaaggctttgcattacaagcagcagatggcgctaaagttcagaagaacctaggcgaagcagttgaagttgttggtgcggacagtaacatcaccacgaaagttgcaggcggtcaggttgcaattgagttaaataaaaacctcaacaacttaactggcattaccgtgaacgatggaaccaatggcaccaatggttcaactgtgattggtaaagatggtatttcggttaaagatggttcaggcaataccattgcaggtgtagataacacagcgttgacagttaaagatggcagtggcaacacagaaaccagcattaaccaagcgatcaacacgttaaatgcagcgcaaggtgaaactgataagtttgcagtgaagtacgacaaaaatgctgatggcagtgcaaactataacaatgtcactttagctggtacaaatggcacaataatcagcaatgttaaagcgggtgctgtgacctcaacatctactgatgcgatcaatggtagccaattatatggtgttgcaaacagcgtgaagaatgcaattggtggttcaaccacaattgatgcaacgactggtgcaatcacgacgaccaatattggtggtacaggttcaaatacgattgatggtgcaatcagcagtattaaagattcagcgactaaagcgaaaaccacggtaagtgctggggataatgttgtcgttacatcgggtaccaatgcagatggctcaacaaactatgaagttgcgacagcgaaagacgttaactttgacaaagtgactgtaggtagtgttgttgtagataaatcaagcaatacaatcaaaggattaagtaataccacttggaacggaacagcagtatcaggtcaagcggcgacagaagaccagttaaaaacggtcagcgatgcgcaaggtgaaactgataagtttgcagtgaagtacgacaaaaatgctgatggcagtgcgaactacaacagtattactgcaggcaatggtaacggtactgcagcaacgatcggaactgacacagcaggtaatagtgttgtgaccagtggcggaactaaaattagtaatgttgcgaatggtgtcaatgcaagtgatgcagtaaacaaaggtcaattggatagcttaagtacaggtcttaccaatacaggctttggtttaaaagcagcagatggcaacaccgttaacaaaaaattaggcgaagcagtagacgttgtcggtgctgacagcaacatcaccacgaaagttgcaggcggtcaggttgcgattgagttaaataaaaacctcaacaacttaactggcattaccgtgaacgatggaaccaatggcaccaatggttcaactgtgattggtaaagatggtatttcgattaaagatggttcaggcaataccattgcaggtgtagataacacagcgttgacggttaaagatagcagtggcaacacagaaaccagcattaaccaagcgatcaacacgttaaatgcagcgcaaggtgaaactgataagtttgcagtgaagtacgataagaatgctgatggcagtgtgaactataacaatgtcactttagcaggtacaaatggcacaataatcagaaatgttaaagcgggtgctgtgacctcaacatctactgatgcgatcaatggtagccaattatacgatattgcaaacagcgtgaagaatgcaattggtggttcaaccacaagagatgtaacgactggtgcaatcacaacgaccaatattggtggtacaggttcaaacacgattgatggtgcaatcagcagtattaaagattcagcgactaaagcgaaaaccacgataagtgctggggataatgttgtcgttacatcgggtaccaatgcagatggctcaacaaactatgaagttgcgacagcgaaagacgttaactttgacaaagtaactgtaggtaatgttgttgttgataaggcaaatgacacgatccaaggtttgagcaataaagatctaaattcaactgattttgcgaccaaaggtagagctgcgactgaagaacagttaaaagcagtgattaccagtaatatcacggaagttgtggatggtaatggcaacaaggtgaatattattgaccaagttgtaaataccaaacctgacaataagaaccaagattcattgttcttaacgtatgacaaacaaggtcaagaaaccacagatcgcctaacgattggtcaaacggtacagaagatgaatactgatggtattaaattcttccataccaatgccgatacatcaaaaggtgatttgggtacaacaaatgactcaagtgcaggtggtttaaactctacagcaattggtgtaaatgcgattgttgcgaatggtgcagatagttcagttgctttaggtcataacaccaaagtcaatggtaaacaatcaattgcaattggttctggtgcagaagctttaggcaatcaatcgatcagtattggtacaggcaataaagtcactggtgatcattcgggtgcgattggtgatccaactattgtaaatggtgcaaacagctactctgtgggtaataacaaccaagtacttacagatgacactttcgtacttggaaacaatgtcaccaaaactattgctggttcagtagtattgggtaacggttcagctgcaacgacaggtgctggtgaggcaggctatgccttatctgtagcaacaaatgcagataaagccgcgatcactaaaactacgtcaagcactggtgctgttgcagttggtgatgcgtcgagcggtatttatcgtcaaattaccggtgttgctgcgggtagcgtagattcagatgctgtgaacgttgcacagttaaatacaaccaaccaagcggtagtcaattatcttggtggtggggcaggttatgacaacattacaggtagcttcacagcgccaagttatacggtaggtgactcgaaatacaacaatgttggtggcgcaattgatgcattgaatcaagcagatcaagcattgaatagcaaaattgacaatgtcagtaacaagttggataacgcattccgtattaccaacaaccgtattgatgatgtagagaaaaaagccaatgctggtattgccgctgcgatggctctggaatcagcaccatatgtcccaggtaaatatacctatgcagcaggcgcagcttaccacggtggtgaaaatgcggtaggtgtgactttacgtaaaactgcagacaatggtcgttggtcgattacaggcggtgtagctgcagcgtctcaaggcgatgcaagtgttcgtatcggtatcagcggtgtgattgactaa

SEQ ID NO: 17 - protein, 3324 aa, artificial sequence
  Synthetic Construct
MNKIYKVIWNATLLAWVAVSELAKGKTKSTTSKSKAKSLSSSVIVGGIILTTPLSLIAATVQVGGGTNSGTTATASTNCADLYNYQNPENSGSGAAGNYNAGNPSVCSIAIGENAQGGTSGTGGSPGIAIGGNSKATGGLSVAIGGYAQATNVGSIALGTAALSSGFNSLAISRQAAATNNYSIAIGTTSVSKGVGSIAMGHSTNASGDQSIAIGSSDAVNSATATTTYDGTTNTQASGSKSIAIGASAKASTNNSIALGAGSVTSAQSGNSYLTGVGASATNGVVSVGTSTATRRIQNVADGSAASDAVTVAQLDKAYDDTNGRLAAALGTGSGAAYNAANNTYTAPTNIGGTGKNTIDDAIKATQRSVVAGSNIVVTPTTASDGSISYSVATSATPTFTSITVNNAPTAGTDATNKTYVDSKAAASRTEVAAGSNVSGVVKTTGANGQDVYTVNANGTTASAGSSAVTVTPGTKDANNVTDYKVDLSATTKTDIQKGVDAKNAVDTAGLKFKGDTATTSNTKKLGDTVSITGDTNISTVATTDGVQVKLNPNLDLGATGSVKTGNTTINNAGVTADQVTVGGVVINNTSGINAGGKAITNVAAPTNNTDAANKKYVDDAGTALTNLGFGLKAQDGTTVNKKLGEAVDIVGSNSNISTKVNAGKVEVALSNTLDLGTTGSVTTGSTVINNAGVTATQVTANKVTINNAPTAGTDATNKTYVDSKAAASRTEVAAGSNVSGVVKTTGANGQDIYAVNANGTTASAGSSAVTVTPGTKDANNVTDYKVDLSATTKTDIQKGVDAKNAVDTAGLKFKGDTATTSNTKKLGDTVSITGDTNISTVATTDGVQVKLNPNLDLGATGSVKTGNTTINNAGVTADQVTVGGVVINNTSGINAGGKAITNVAAPTNNTDAANKKYVDDAGTALTNLGFGLKAQDGTTVNKKLGEAVDIVGSNSNISTKVNAGKVEVALSNTLDLGTTGSVTTGSTVINNAGVTATQVTANKVTVNNAPTAGTDATNKTYVDSKAAASRTEVAAGSNVSGVVKTTGANGQDVYTVNANGTTASAGSSAVTVTPGTKDANNVTDYKVDLSATTKTDIQKGVDAKNAVDTAGLKFKGDTATTSNTKKLGDTVSITGDTNISTVATTDGVQVKLNPNLDLGATGSVKTGNTTINNAGVTADQVTVGGVVINNTSGINAGGKAITNVAAPTNNTDAANKKYVDDAGTALTNLGFGLKAQDGTTVNKKLGEAVEVVGADSNITTKVAGGQVAIELNKNLNNLTGITVNDGTNGTNGSTVIGKDGISVKDGSGNTIAGVDNTALTVKDGSGNTETSINQAINTLNAAQGETDKFAVKYDKNADGSVNYNNITLAGTTASSTQDATTGKITTTGGTSLNNVASAGDYKDVANASKGVNAGDLNNAVVDATNAATSKGFALQAADGAKVQKNLGEAVEVVGADSNITTKVAGGQVAIELNKNLNNLTGITVNDGTNGTNGSTVIGKDGISVKDGSGNTIAGVDNTALTVKDGSGNTETSINQAINTLNAAQGETDKFAVKYDKNTDGSTNYNSITAGNGNGTAATIGTDTAGNSVVTSGGTKISNVANGVNASDAVNKGQLDSLSTGLTNTGFGLKAADGNTVNKKLGEAVDVVGADSNITTKVAGGQVAIELNKNLNNLTGITVNDGTNGTNGSTVIGKDGISIKDGSGNTIAGVDNTALTVKDGSGNTETSINQAINTLNAAQGETDKFAVKYDKNADGSANYNNITLAGTTASSTQDATTGKITTTGGTSLNNVASAGDYKDVANASKGVNAGDLNNAVVDATNAATSKGFALQAADGAKVQKNLGEAVEVVGADSNITTKVVGGQVAIELNKNLNNLTGITVNDGTNGTNGSTVIGKDGISVKDGSGNTIAGVDNTALTVKDGSGNTETSINQAINTLNAAQGETDKFAVKYDKNADGSVNYNNITLAGTTASSTQDATTGKITTTGGTSLNNVASAGDYKDVANASKGVNAGDLNNAVVDATNAATSKGFALQAADGAKVQKNLGEAVEVVGADSNITTKVAGGQVAIELNKNLNNLTGITVNDGTNGTNGSTVIGKDGISVKDGSGNTIAGVDNTALTVKDGSGNTETSINQAINTLNAAQGETDKFAVKYDKNADGSVNYNNITLAGTTASSTQDATTGKITTTGGTSLNNVASAGDYKDVANASKGVNAGDLNNAVVDATNAATSKGFALQAADGAKVQKNLGEAVEVVGADSNITTKVAGGQVAIELNKNLNNLTGITVNDGTNGTNGSTVIGKDGISVKDGSGNTIAGVDNTALTVKDGSGNTETSINQAINTLNAAQGETDKFAVKYDKNADGSANYNNVTLAGTNGTIISNVKAGAVTSTSTDAINGSQLYGVANSVKNAIGGSTTIDATTGAITTTNIGGTGSNTIDGAISSIKDSATKAKTTVSAGDNVVVTSGTNADGSTNYEVATAKDVNFDKVTVGSVVVDKSSNTIKGLSNTTWNGTAVSGQAATEDQLKTVSDAQGETDKFAVKYDKNADGSANYNSITAGNGNGTAATIGTDTAGNSVVTSGGTKISNVANGVNASDAVNKGQLDSLSTGLTNTGFGLKAADGNTVNKKLGEAVDVVGADSNITTKVAGGQVAIELNKNLNNLTGITVNDGTNGTNGSTVIGKDGISIKDGSGNTIAGVDNTALTVKDSSGNTETSINQAINTLNAAQGETDKFAVKYDKNADGSVNYNNVTLAGTNGTIIRNVKAGAVTSTSTDAINGSQLYDIANSVKNAIGGSTTRDVTTGAITTTNIGGTGSNTIDGAISSIKDSATKAKTTISAGDNVVVTSGTNADGSTNYEVATAKDVNFDKVTVGNVVVDKANDTIQGLSNKDLNSTDFATKGRAATEEQLKAVITSNITEVVDGNGNKVNIIDQVVNTKPDNKNQDSLFLTYDKQGQETTDRLTIGQTVQKMNTDGIKFFHTNADTSKGDLGTTNDSSAGGLNSTAIGVNAIVANGADSSVALGHNTKVNGKQSIAIGSGAEALGNQSISIGTGNKVTGDHSGAIGDPTIVNGANSYSVGNNNQVLTDDTFVLGNNVTKTIAGSVVLGNGSAATTGAGEAGYALSVATNADKAAITKTTSSTGAVAVGDASSGIYRQITGVAAGSVDSDAVNVAQLNTTNQAVVNYLGGGAGYDNITGSFTAPSYTVGDSKYNNVGGAIDALNQADQALNSKIDNVSNKLDNAFRITNNRIDDVEKKANAGIAAAMALESAPYVPGKYTYAAGAAYHGGENAVGVTLRKTADNGRWSITGGVAAASQGDASVRIGISGVID

SEQ ID NO: 18 - DNA, 918 bp, artificial sequence
  Nhead-GCN4pII-His
  CDS (1)..(918)
atggctactgttcaagttggagggggaactaattctggaacaactgctacagcttctacgaattgtgcagacttatataattatcaaaatcctgagaactcaggctctggagcggctgggaattataatgcaggaaatccaagtgtgtgttcgatcgctataggtgaaaacgcacaaggtggtacttctggaactggagggtcgccagggatagcgataggtggaaattctaaagctacgggtggtttatctgttgctataggcggatatgctcaagcgacaaatgttggaagtattgctttaggcacagcagctttatcaagtggttttaacagtttagcaatatccagacaagctgctgcaacgaataactattcaatagctataggtacaacttcagtttcgaaaggagttggatcgattgctatggggcattcaacgaatgcttctggagatcaatcgatagcaattggtagctcggatgctgttaattcagcaacagcaacaacaacatacgatggtacaacaaatactcaagcatcaggtagtaaatcgattgctataggtgcaagcgcaaaggcatcaaccaataacagcattgcactaggtgcaggatcggtaacttctgcacaatctggtaattcttatcttactggtgtaggtgcatcagctacaaatggtgttgtatctgttggaacttcaactgcaacacgtcgtatccaaaatgtagcagatggttcagccgcttcagatgctgtgacagttgctcagttggataaagcttatgatgatacaaatggtcgtatgaaacagattgaagataaaattgaagaaattctgagcaaaatttatcatattgaaaacgaaattgcgcgtattaaaaaactgattaagcttcatcatcatcatcatcactga

SEQ ID NO: 19 - protein, 305 aa, artificial sequence
  Synthetic Construct
MATVQVGGGTNSGTTATASTNCADLYNYQNPENSGSGAAGNYNAGNPSVCSIAIGENAQGGTSGTGGSPGIAIGGNSKATGGLSVAIGGYAQATNVGSIALGTAALSSGFNSLAISRQAAATNNYSIAIGTTSVSKGVGSIAMGHSTNASGDQSIAIGSSDAVNSATATTTYDGTTNTQASGSKSIAIGASAKASTNNSIALGAGSVTSAQSGNSYLTGVGASATNGVVSVGTSTATRRIQNVADGSAASDAVTVAQLDKAYDDTNGRMKQIEDKIEEILSKIYHIENEIARIKKLIKLHHHHHH

SEQ ID NO: 20 - DNA, 10809 bp, artificial sequence
  AtaA del first loop
  CDS (1)..(10809)
atgaataaaatctacaaagtgatttggaatgcgactttgttggcatgggttgcagtatctgaattggcaaaagggaaaaccaaatctacgacatcaaaatccaaagctaaatcattatcttcatctgtaatagttggtgggataatattaacaacacctttatctttaatagcagctactgttcaagttggagggggaactaattctggaacaactgctacagcttctacgaatggttcgatcgctataggtgaaaacgcacaaggtggtacttctggaactggagggtcgccagggatagcgataggtggaaattctaaagctacgggtggtttatctgttgctataggcggatatgctcaagcgacaaatgttggaagtattgctttaggcacagcagctttatcaagtggttttaacagtttagcaatatccagacaagctgctgcaacgaataactattcaatagctataggtacaacttcagtttcgaaaggagttggatcgattgctatggggcattcaacgaatgcttctggagatcaatcgatagcaattggtagctcggatgctgttaattcagcaacagcaacaacaacatacgatggtacaacaaatactcaagcatcaggtagtaaatcgattgctataggtgcaagcgcaaaggcatcaaccaataacagcattgcactaggtgcaggatcggtaacttctgcacaatctggtaattcttatcttactggtgtaggtgcatcagctacaaatggtgttgtatctgttggaacttcaactgcaacacgtcgtatccaaaatgtagcagatggttcagccgcttcagatgctgtgacagttgctcagttggataaagcttatgatgatacaaatggtcgtttagctgctgctttaggtacaggtagtggtgctgcctataatgcagcaaacaatacatataccgctccaacgaatattgggggaacaggtaaaaatacgattgatgatgcaattaaagcaactcaacgaagtgtagtcgctggatcaaatattgtcgttaccccgacgacagcttctgatggttcaatatcgtattcggttgctacaagcgcaacaccgacgtttacaagtataactgtaaacaatgcaccaacggcaggtacagatgcgaccaacaagacttatgtagactcaaaagcagcagcatcgagaacagaagtagcagctggaagcaatgtatctggtgtagtaaaaacgacaggcgcaaacggtcaagacgtttatacagtaaatgccaatggtacgactgcatcagcaggttcttcagcagttaccgtaacaccaggcacgaaagatgcaaataatgtcactgactataaagtagacttatcagcgactacaaaaaccgatatccaaaaaggtgtagatgcaaaaaatgctgtagataccgcaggtctaaaatttaaaggtgatacagcaaccacaagcaataccaagaaattaggtgacaccgtttcgattacgggtgatacgaacattagtacagttgcgacaacagatggtgtacaggttaagttaaatccaaacttggatttaggagcaactggtagcgttaaaacgggtaataccacgattaacaatgcaggtgtaacagctgatcaagttacggttggtggtgttgttattaacaacacatcaggtattaatgctggtggtaaagcgattactaatgtagcagcaccaacaaataacacagatgctgctaacaagaagtatgtagatgatgcaggtacagcattaaccaatttgggctttggattaaaagcacaagatggtacgactgtgaacaagaaattaggtgaagcagttgatattgttggttcaaacagcaacatcagtacaaaagtaaatgcaggcaaagtagaagttgcactatccaatacattggacttaggtactacaggtagcgttactacgggttcaactgtaattaacaatgctggtgttacggcaactcaagttaccgcaaacaaagtcacaataaacaatgcaccaacagcaggtacagatgcgaccaacaagacttatgtagactcaaaagcagcagcatcaagaacagaagtcgcagctggaagcaatgtatctggtgtagtaaaaacgacaggcgcaaacggtcaagatatttatgcagtaaatgccaatggtacgactgcatcagcaggttcttcagcagttaccgtaacaccaggcacgaaagatgcaaataatgtcactgactataaagtagacttgtcagcgactacaaaaaccgatattcaaaaaggtgtagatgcaaaaaatgctgtagatactgcaggtctaaaatttaaaggtgatacagcaaccacaagcaataccaagaaattaggtgacaccgtttcgattacgggtgatacgaacattagtacagttgcaacaactgatggtgtacaggttaagttaaatccaaacttagatttaggagcaactggtagcgttaaaacgggtaataccacgattaacaatgcaggtgtaacagctgaccaagttacggttggtggtgttgttattaacaacacatcaggtattaatgctggtggtaaagcgattaccaatgtagcagcaccaacaaataacacagatgctgctaacaagaagtatgtagatgacgcaggtacagcattaaccaatttgggctttggattaaaagcgcaagatggtacgactgtgaacaagaaattaggtgaagcagttgatattgttggttcaaacagcaacatcagtacaaaagtaaatgcaggcaaagtagaagttgcactatccaatacattggacttaggtactacaggtagcgttactacgggttcaactgtaattaacaatgctggtgttacggcaactcaagttaccgcaaacaaagtcacagttaataatgcaccaacagcaggtacagatgcgaccaataaaacttatgtagactcaaaagcagcggcatcaagaacagaagtcgcagctggaagcaatgtatctggcgtagtaaaaacgacaggtgcaaacggtcaagacgtttatacagtaaatgccaatggtacgactgcatcagcaggttcttcagcagttaccgtaacaccaggcacgaaagatgcaaataatgtcactgactataaagtagacttgtcagcgactacaaaaaccgatattcaaaaaggtgtagatgcaaaaaatgctgtagataccgcaggtctaaaatttaaaggtgatacagcaaccacaagcaataccaagaaattaggtgacaccgtttcgattacgggtgatacgaacattagtacagttgcgacaactgatggtgtacaggttaagctaaatccaaacttggatttaggagcaactggtagcgttaaaacgggtaataccacgattaacaatgcaggtgtaacagctgatcaagttacagttggtggtgttgttattaacaacacatcaggtattaatgctggtggtaaagcgattaccaatgtagcagcaccaacaaataacacagatgctgctaacaagaagtatgtagatgatgcaggtacagcattaaccaatttgggctttggattaaaagcgcaagatggtacgactgtgaacaagaaattaggcgaagcagttgaagttgttggtgcggacagtaacatcaccacgaaagttgcaggcggtcaggttgcaattgagttaaataaaaacctcaacaacttaactggcattaccgtgaacgatggaaccaatggcaccaatggttcaactgtgattggtaaagatggtatttcggttaaagatggttcaggcaataccattgcaggtgtagataacacagcgttgacagttaaagatggcagtggcaacacagaaaccagcattaaccaagcgatcaacacgttaaatgcagcgcaaggtgaaactgataagtttgcagtgaagtacgacaaaaatgctgatggcagtgtgaactacaacaacatcacattggcaggtacgactgcaagcagtacacaagatgcaactacaggcaagatcaccacaacaggtggaacaagcttgaacaatgttgcaagtgcgggtgactacaaagatgttgccaatgcaagcaaaggtgtaaacgcaggtgacttaaacaatgcagttgttgatgcaaccaatgcagcaaccagcaaaggctttgcattacaagcagcagatggcgctaaagttcagaagaacctaggcgaagcagttgaagttgtcggtgccgacagcaacatcaccacaaaagttgcaggcggtcaggttgcaattgagttaaataaaaacctcaacaacttaactggcattaccgtgaacgatggaaccaatggcaccaatggttcaactgtgattggtaaagatggtatttcagttaaagacggttcaggcaataccattgcaggtgtagataacacagcgttgacagttaaagatggcagtggcaacacagaaaccagcattaaccaagcgatcaacacgttaaatgcagcgcaaggtgaaactgataagtttgcagtgaagtacgacaaaaatacggatggtagtaccaactacaacagtattactgcaggcaatggtaacggtactgcagcaacgatcggaactgacacagcaggtaatagtgttgtgaccagtggcggaactaaaattagtaatgttgcgaatggtgtcaatgcaagtgatgcagtaaacaaaggtcaattggatagcttaagtacaggtcttaccaatacaggctttggtttaaaagcagcagatggcaacaccgttaacaaaaaattaggcgaagcagtagacgttgtcggtgctgacagcaacatcaccacgaaagttgcaggcggtcaggttgcgattgagttaaataaaaacctcaacaacttaactggcattaccgtgaacgatggaaccaatggcaccaatggttcaactgtgattggtaaagatggtatttcgattaaagatggttcaggcaataccattgcaggtgtagataacacagcgttgacagttaaagatggcagtggcaacacagaaaccagcattaaccaagcgatcaacacgttaaatgcagcgcaaggtgaaactgacaagtttgcagtgaagtacgacaagaatgctgatggcagtgcaaactacaacaacatcacattggcaggtacgactgcaagtagcacgcaagatgcaacaacaggcaagatcaccacaacaggtggaacaagcttgaacaacgttgcaagtgcaggtgactacaaagatgttgccaatgcaagcaaaggtgtaaacgcaggtgacttgaacaatgcagttgttgatgcaaccaatgcagcaaccagcaaaggctttgcattacaagcagcagatggcgctaaagttcagaagaacctaggcgaagcagttgaagttgtcggtgcggacagcaacatcaccacaaaagtagtgggtggacaagttgcgattgagttaaataaaaacctcaacaacttaactggcattaccgtgaacgatggaaccaatggcacaaatggttcaactgtgattggtaaagatggtatttcggttaaagatggttcaggtaataccattgcaggtgtagataacacagcgttgacagttaaagatggcagtggcaacacagaaaccagcattaaccaagcgatcaacacgttaaatgcagcgcaaggtgaaactgataagtttgcagtgaagtacgacaaaaatgctgatggcagtgtgaactacaacaacatcacattggcaggtacgactgcaagcagtacacaagatgcaactacaggcaagatcaccacaacaggtggaacaagcttgaacaatgttgcaagtgcgggtgactacaaagatgttgccaatgcaagcaaaggtgtaaacgcaggtgacttaaacaatgcagttgttgatgcaaccaatgcagcaaccagcaaaggctttgcattacaagcagcagatggcgctaaagttcagaagaacctaggcgaagcagttgaagttgtcggtgccgacagcaacatcaccacaaaagttgcaggcggtcaggttgcaattgagttaaataaaaacctcaacaacttaactggcattaccgtgaacgatggaaccaatggcaccaatggttcaactgtgattggtaaagatggtatttcagttaaagacggttcaggcaataccattgcaggtgtagataacacagcgttgacagttaaagatggcagtggcaacacagaaaccagcattaaccaagcgatcaacacgttaaatgcagcgcaaggtgaaactgataagtttgcagtgaagtacgacaaaaatgctgatggcagtgtgaactacaacaacatcacattggcaggtacgactgcaagcagtacacaagatgcaactacaggcaagatcaccacaacaggtggtacaagcttgaacaatgttgcaagtgcgggtgactacaaagatgttgccaatgcaagcaaaggtgtaaacgcaggtgacttgaacaatgcagttgttgatgcaaccaatgcagcgaccagcaaaggctttgcattacaagcagcagatggcgctaaagttcagaagaacctaggcgaagcagttgaagttgttggtgcggacagtaacatcaccacgaaagttgcaggcggtcaggttgcaattgagttaaataaaaacctcaacaacttaactggcattaccgtgaacgatggaaccaatggcaccaatggttcaactgtgattggtaaagatggtatttcggttaaagatggttcaggcaataccattgcaggtgtagataacacagcgttgacagttaaagatggcagtggcaacacagaaaccagcattaaccaagcgatcaacacgttaaatgcagcgcaaggtgaaactgataagtttgcagtgaagtacgacaaaaatgctgatggcagtgcaaactataacaatgtcactttagctggtacaaatggcacaataatcagcaatgttaaagcgggtgctgtgacctcaacatctactgatgcgatcaatggtagccaattatatggtgttgcaaacagcgtgaagaatgcaattggtggttcaaccacaattgatgcaacgactggtgcaatcacgacgaccaatattggtggtacaggttcaaatacgattgatggtgcaatcagcagtattaaagattcagcgactaaagcgaaaaccacggtaagtgctggggataatgttgtcgttacatcgggtaccaatgcagatggctcaacaaactatgaagttgcgacagcgaaagacgttaactttgacaaagtgactgtaggtagtgttgttgtagataaatcaagcaatacaatcaaaggattaagtaataccacttggaacggaacagcagtatcaggtcaagcggcgacagaagaccagttaaaaacggtcagcgatgcgcaaggtgaaactgataagtttgcagtgaagtacgacaaaaatgctgatggcagtgcgaactacaacagtattactgcaggcaatggtaacggtactgcagcaacgatcggaactgacacagcaggtaatagtgttgtgaccagtggcggaactaaaattagtaatgttgcgaatggtgtcaatgcaagtgatgcagtaaacaaaggtcaattggatagcttaagtacaggtcttaccaatacaggctttggtttaaaagcagcagatggcaacaccgttaacaaaaaattaggcgaagcagtagacgttgtcggtgctgacagcaacatcaccacgaaagttgcaggcggtcaggttgcgattgagttaaataaaaacctcaacaacttaactggcattaccgtgaacgatggaaccaatggcaccaatggttcaactgtgattggtaaagatggtatttcgattaaagatggttcaggcaataccattgcaggtgtagataacacagcgttgacggttaaagatagcagtggcaacacagaaaccagcattaaccaagcgatcaacacgttaaatgcagcgcaaggtgaaactgataagtttgcagtgaagtacgataagaatgctgatggcagtgtgaactataacaatgtcactttagcaggtacaaatggcacaataatcagaaatgttaaagcgggtgctgtgacctcaacatctactgatgcgatcaatggtagccaattatacgatattgcaaacagcgtgaagaatgcaattggtggttcaaccacaagagatgtaacgactggtgcaatcacaacgaccaatattggtggtacaggttcaaacacgattgatggtgcaatcagcagtattaaagattcagcgactaaagcgaaaaccacgataagtgctggggataatgttgtcgttacatcgggtaccaatgcagatggctcaacaaactatgaagttgcgacagcgaaagacgttaactttgacaaagtaactgtaggtaatgttgttgttgataaggcaaatgacacgatccaaggtttgagcaataaagatctaaattcaactgattttgcgaccaaaggtagagctgcgactgaagaacagttaaaagcagtgattaccagtaatatcacggaagttgtggatggtaatggcaacaaggtgaatattattgaccaagttgtaaataccaaacctgacaataagaaccaagattcattgttcttaacgtatgacaaacaaggtcaagaaaccacagatcgcctaacgattggtcaaacggtacagaagatgaatactgatggtattaaattcttccataccaatgccgatacatcaaaaggtgatttgggtacaacaaatgactcaagtgcaggtggtttaaactctacagcaattggtgtaaatgcgattgttgcgaatggtgcagatagttcagttgctttaggtcataacaccaaagtcaatggtaaacaatcaattgcaattggttctggtgcagaagctttaggcaatcaatcgatcagtattggtacaggcaataaagtcactggtgatcattcgggtgcgattggtgatccaactattgtaaatggtgcaaacagctactctgtgggtaataacaaccaagtacttacagatgacactttcgtacttggaaacaatgtcaccaaaactattgctggttcagtagtattgggtaacggttcagctgcaacgacaggtgctggtgaggcaggctatgccttatctgtagcaacaaatgcagataaagccgcgatcactaaaactacgtcaagcactggtgctgttgcagttggtgatgcgtcgagcggtatttatcgtcaaattaccggtgttgctgcgggtagcgtagattcagatgctgtgaacgttgcacagttaaaagcggtgggtaaccaagttgtaacgactcaaactacattggtgaacagtttgggtggtaacgctaaagtaaatgcagacggtacgattacaggaccaacttataatgttgctcaaggtaatcagaccaatgttggtgatgcattaactgcgcttgataacgcaattaatactgcggcaacaacatctaaatcgactgtttctaatggtcagaatattgttgtcagcaagagcaaaaatgcagatggttcagacaactatgaagtatcaacagcaaaagacttgacagttgattctgtcaaagcgggtgatacggttctgaataatgcaggtattacaattggcaataacgcagttgtattgaacaacactggattaaccattagtggtggaccaagtgttaccttggcaggcatcgatgcaggcaataaaaccattcaaaatgttgcgaatgcagtaaatgcaacagatgcagtcaacaaagggcaattggacagcgcaattaacaatgtgaataacaatgtaaatgagcttgccaacaacgctgttaaatatgacgatgcatcaaaagataagatcacacttggtggtggggcaactggtacaacaatcaccaatgtgaaagatggtactgttgcgcaaggttctaaagatgctgtgaatggcggtcaattgtggaatgttcaacaacaagttgatcagaacacaactgatattagcaatatcaaaaatgatattaacaacggtactgttggtttggttcaacaagcaggtaaagatgcaccagtgacggttgcaaaagatactggcggtacaacggtgaatgtcgctggaacagatggcaaccgagtagtgacaggtgttaaggaaggtgcagtgaatgcaacatctaaagatgctgtcaatggtagtcaattgaatacaaccaaccaagcggtagtcaattatcttggtggtggggcaggttatgacaacattacaggtagcttcacagcgccaagttatacggtaggtgactcgaaatacaacaatgttggtggcgcaattgatgcattgaatcaagcagatcaagcattgaatagcaaaattgacaatgtcagtaacaagttggataacgcattccgtattaccaacaaccgtattgatgatgtagagaaaaaagccaatgctggtattgccgctgcgatggctctggaatcagcaccatatgtcccaggtaaatatacctatgcagcaggcgcagcttaccacggtggtgaaaatgcggtaggtgtgactttacgtaaaactgcagacaatggtcgttggtcgattacaggcggtgtagctgcagcgtctcaaggcgatgcaagtgttcgtatcggtatcagcggtgtgattgactaa

SEQ ID NO: 21 - protein, 3602 aa, artificial sequence
  Synthetic Construct
MNKIYKVIWNATLLAWVAVSELAKGKTKSTTSKSKAKSLSSSVIVGGIILTTPLSLIAATVQVGGGTNSGTTATASTNGSIAIGENAQGGTSGTGGSPGIAIGGNSKATGGLSVAIGGYAQATNVGSIALGTAALSSGFNSLAISRQAAATNNYSIAIGTTSVSKGVGSIAMGHSTNASGDQSIAIGSSDAVNSATATTTYDGTTNTQASGSKSIAIGASAKASTNNSIALGAGSVTSAQSGNSYLTGVGASATNGVVSVGTSTATRRIQNVADGSAASDAVTVAQLDKAYDDTNGRLAAALGTGSGAAYNAANNTYTAPTNIGGTGKNTIDDAIKATQRSVVAGSNIVVTPTTASDGSISYSVATSATPTFTSITVNNAPTAGTDATNKTYVDSKAAASRTEVAAGSNVSGVVKTTGANGQDVYTVNANGTTASAGSSAVTVTPGTKDANNVTDYKVDLSATTKTDIQKGVDAKNAVDTAGLKFKGDTATTSNTKKLGDTVSITGDTNISTVATTDGVQVKLNPNLDLGATGSVKTGNTTINNAGVTADQVTVGGVVINNTSGINAGGKAITNVAAPTNNTDAANKKYVDDAGTALTNLGFGLKAQDGTTVNKKLGEAVDIVGSNSNISTKVNAGKVEVALSNTLDLGTTGSVTTGSTVINNAGVTATQVTANKVTINNAPTAGTDATNKTYVDSKAAASRTEVAAGSNVSGVVKTTGANGQDIYAVNANGTTASAGSSAVTVTPGTKDANNVTDYKVDLSATTKTDIQKGVDAKNAVDTAGLKFKGDTATTSNTKKLGDTVSITGDTNISTVATTDGVQVKLNPNLDLGATGSVKTGNTTINNAGVTADQVTVGGVVINNTSGINAGGKAITNVAAPTNNTDAANKKYVDDAGTALTNLGFGLKAQDGTTVNKKLGEAVDIVGSNSNISTKVNAGKVEVALSNTLDLGTTGSVTTGSTVINNAGVTATQVTANKVTVNNAPTAGTDATNKTYVDSKAAASRTEVAAGSNVSGVVKTTGANGQDVYTVNANGTTASAGSSAVTVTPGTKDANNVTDYKVDLSATTKTDIQKGVDAKNAVDTAGLKFKGDTATTSNTKKLGDTVSITGDTNISTVATTDGVQVKLNPNLDLGATGSVKTGNTTINNAGVTADQVTVGGVVINNTSGINAGGKAITNVAAPTNNTDAANKKYVDDAGTALTNLGFGLKAQDGTTVNKKLGEAVEVVGADSNITTKVAGGQVAIELNKNLNNLTGITVNDGTNGTNGSTVIGKDGISVKDGSGNTIAGVDNTALTVKDGSGNTETSINQAINTLNAAQGETDKFAVKYDKNADGSVNYNNITLAGTTASSTQDATTGKITTTGGTSLNNVASAGDYKDVANASKGVNAGDLNNAVVDATNAATSKGFALQAADGAKVQKNLGEAVEVVGADSNITTKVAGGQVAIELNKNLNNLTGITVNDGTNGTNGSTVIGKDGISVKDGSGNTIAGVDNTALTVKDGSGNTETSINQAINTLNAAQGETDKFAVKYDKNTDGSTNYNSITAGNGNGTAATIGTDTAGNSVVTSGGTKISNVANGVNASDAVNKGQLDSLSTGLTNTGFGLKAADGNTVNKKLGEAVDVVGADSNITTKVAGGQVAIELNKNLNNLTGITVNDGTNGTNGSTVIGKDGISIKDGSGNTIAGVDNTALTVKDGSGNTETSINQAINTLNAAQGETDKFAVKYDKNADGSANYNNITLAGTTASSTQDATTGKITTTGGTSLNNVASAGDYKDVANASKGVNAGDLNNAVVDATNAATSKGFALQAADGAKVQKNLGEAVEVVGADSNITTKVVGGQVAIELNKNLNNLTGITVNDGTNGTNGSTVIGKDGISVKDGSGNTIAGVDNTALTVKDGSGNTETSINQAINTLNAAQGETDKFAVKYDKNADGSVNYNNITLAGTTASSTQDATTGKITTTGGTSLNNVASAGDYKDVANASKGVNAGDLNNAVVDATNAATSKGFALQAADGAKVQKNLGEAVEVVGADSNITTKVAGGQVAIELNKNLNNLTGITVNDGTNGTNGSTVIGKDGISVKDGSGNTIAGVDNTALTVKDGSGNTETSINQAINTLNAAQGETDKFAVKYDKNADGSVNYNNITLAGTTASSTQDATTGKITTTGGTSLNNVASAGDYKDVANASKGVNAGDLNNAVVDATNAATSKGFALQAADGAKVQKNLGEAVEVVGADSNITTKVAGGQVAIELNKNLNNLTGITVNDGTNGTNGSTVIGKDGISVKDGSGNTIAGVDNTALTVKDGSGNTETSINQAINTLNAAQGETDKFAVKYDKNADGSANYNNVTLAGTNGTIISNVKAGAVTSTSTDAINGSQLYGVANSVKNAIGGSTTIDATTGAITTTNIGGTGSNTIDGAISSIKDSATKAKTTVSAGDNVVVTSGTNADGSTNYEVATAKDVNFDKVTVGSVVVDKSSNTIKGLSNTTWNGTAVSGQAATEDQLKTVSDAQGETDKFAVKYDKNADGSANYNSITAGNGNGTAATIGTDTAGNSVVTSGGTKISNVANGVNASDAVNKGQLDSLSTGLTNTGFGLKAADGNTVNKKLGEAVDVVGADSNITTKVAGGQVAIELNKNLNNLTGITVNDGTNGTNGSTVIGKDGISIKDGSGNTIAGVDNTALTVKDSSGNTETSINQAINTLNAAQGETDKFAVKYDKNADGSVNYNNVTLAGTNGTIIRNVKAGAVTSTSTDAINGSQLYDIANSVKNAIGGSTTRDVTTGAITTTNIGGTGSNTIDGAISSIKDSATKAKTTISAGDNVVVTSGTNADGSTNYEVATAKDVNFDKVTVGNVVVDKANDTIQGLSNKDLNSTDFATKGRAATEEQLKAVITSNITEVVDGNGNKVNIIDQVVNTKPDNKNQDSLFLTYDKQGQETTDRLTIGQTVQKMNTDGIKFFHTNADTSKGDLGTTNDSSAGGLNSTAIGVNAIVANGADSSVALGHNTKVNGKQSIAIGSGAEALGNQSISIGTGNKVTGDHSGAIGDPTIVNGANSYSVGNNNQVLTDDTFVLGNNVTKTIAGSVVLGNGSAATTGAGEAGYALSVATNADKAAITKTTSSTGAVAVGDASSGIYRQITGVAAGSVDSDAVNVAQLKAVGNQVVTTQTTLVNSLGGNAKVNADGTITGPTYNVAQGNQTNVGDALTALDNAINTAATTSKSTVSNGQNIVVSKSKNADGSDNYEVSTAKDLTVDSVKAGDTVLNNAGITIGNNAVVLNNTGLTISGGPSVTLAGIDAGNKTIQNVANAVNATDAVNKGQLDSAINNVNNNVNELANNAVKYDDASKDKITLGGGATGTTITNVKDGTVAQGSKDAVNGGQLWNVQQQVDQNTTDISNIKNDINNGTVGLVQQAGKDAPVTVAKDTGGTTVNVAGTDGNRVVTGVKEGAVNATSKDAVNGSQLNTTNQAVVNYLGGGAGYDNITGSFTAPSYTVGDSKYNNVGGAIDALNQADQALNSKIDNVSNKLDNAFRITNNRIDDVEKKANAGIAAAMALESAPYVPGKYTYAAGAAYHGGENAVGVTLRKTADNGRWSITGGVAAASQGDASVRIGISGVID

SEQ ID NO: 22 - DNA, 10842 bp, artificial sequence
  AtaA del 2nd loop
  CDS (1)..(10842)
atgaataaaatctacaaagtgatttggaatgcgactttgttggcatgggttgcagtatctgaattggcaaaagggaaaaccaaatctacgacatcaaaatccaaagctaaatcattatcttcatctgtaatagttggtgggataatattaacaacacctttatctttaatagcagctactgttcaagttggagggggaactaattctggaacaactgctacagcttctacgaattgtgcagacttatataattatcaaaatcctgagaactcaggctctggagcggctgggaattataatgcaggaaatccaagtgtgtgttcgatcgctataggtgaaaacgcacaaggtggtacttctggaactggagggtcgccagggatagcgataggtggaaattctaaagctacgggtggtttatctgttgctataggcggatatgctcaagcgacaaatgttggaagtattgctttaggcacagcagctttatcaagtggttttaacagtttagcaatatccagacaagctgctgcaacgaataactattcaatagctataggtacaacttcagtttcgaaaggagttggatcgattgctatggggcattcaacgaatgcttctggagatcaatcgatagcaattggtagctcgactcaagcatcaggtagtaaatcgattgctataggtgcaagcgcaaaggcatcaaccaataacagcattgcactaggtgcaggatcggtaacttctgcacaatctggtaattcttatcttactggtgtaggtgcatcagctacaaatggtgttgtatctgttggaacttcaactgcaacacgtcgtatccaaaatgtagcagatggttcagccgcttcagatgctgtgacagttgctcagttggataaagcttatgatgatacaaatggtcgtttagctgctgctttaggtacaggtagtggtgctgcctataatgcagcaaacaatacatataccgctccaacgaatattgggggaacaggtaaaaatacgattgatgatgcaattaaagcaactcaacgaagtgtagtcgctggatcaaatattgtcgttaccccgacgacagcttctgatggttcaatatcgtattcggttgctacaagcgcaacaccgacgtttacaagtataactgtaaacaatgcaccaacggcaggtacagatgcgaccaacaagacttatgtagactcaaaagcagcagcatcgagaacagaagtagcagctggaagcaatgtatctggtgtagtaaaaacgacaggcgcaaacggtcaagacgtttatacagtaaatgccaatggtacgactgcatcagcaggttcttcagcagttaccgtaacaccaggcacgaaagatgcaaataatgtcactgactataaagtagacttatcagcgactacaaaaaccgatatccaaaaaggtgtagatgcaaaaaatgctgtagataccgcaggtctaaaatttaaaggtgatacagcaaccacaagcaataccaagaaattaggtgacaccgtttcgattacgggtgatacgaacattagtacagttgcgacaacagatggtgtacaggttaagttaaatccaaacttggatttaggagcaactggtagcgttaaaacgggtaataccacgattaacaatgcaggtgtaacagctgatcaagttacggttggtggtgttgttattaacaacacatcaggtattaatgctggtggtaaagcgattactaatgtagcagcaccaacaaataacacagatgctgctaacaagaagtatgtagatgatgcaggtacagcattaaccaatttgggctttggattaaaagcacaagatggtacgactgtgaacaagaaattaggtgaagcagttgatattgttggttcaaacagcaacatcagtacaaaagtaaatgcaggcaaagtagaagttgcactatccaatacattggacttaggtactacaggtagcgttactacgggttcaactgtaattaacaatgctggtgttacggcaactcaagttaccgcaaacaaagtcacaataaacaatgcaccaacagcaggtacagatgcgaccaacaagacttatgtagactcaaaagcagcagcatcaagaacagaagtcgcagctggaagcaatgtatctggtgtagtaaaaacgacaggcgcaaacggtcaagatatttatgcagtaaatgccaatggtacgactgcatcagcaggttcttcagcagttaccgtaacaccaggcacgaaagatgcaaataatgtcactgactataaagtagacttgtcagcgactacaaaaaccgatattcaaaaaggtgtagatgcaaaaaatgctgtagatactgcaggtctaaaatttaaaggtgatacagcaaccacaagcaataccaagaaattaggtgacaccgtttcgattacgggtgatacgaacattagtacagttgcaacaactgatggtgtacaggttaagttaaatccaaacttagatttaggagcaactggtagcgttaaaacgggtaataccacgattaacaatgcaggtgtaacagctgaccaagttacggttggtggtgttgttattaacaacacatcaggtattaatgctggtggtaaagcgattaccaatgtagcagcaccaacaaataacacagatgctgctaacaagaagtatgtagatgacgcaggtacagcattaaccaatttgggctttggattaaaagcgcaagatggtacgactgtgaacaagaaattaggtgaagcagttgatattgttggttcaaacagcaacatcagtacaaaagtaaatgcaggcaaagtagaagttgcactatccaatacattggacttaggtactacaggtagcgttactacgggttcaactgtaattaacaatgctggtgttacggcaactcaagttaccgcaaacaaagtcacagttaataatgcaccaacagcaggtacagatgcgaccaataaaacttatgtagactcaaaagcagcggcatcaagaacagaagtcgcagctggaagcaatgtatctggcgtagtaaaaacgacaggtgcaaacggtcaagacgtttatacagtaaatgccaatggtacgactgcatcagcaggttcttcagcagttaccgtaacaccaggcacgaaagatgcaaataatgtcactgactataaagtagacttgtcagcgactacaaaaaccgatattcaaaaaggtgtagatgcaaaaaatgctgtagataccgcaggtctaaaatttaaaggtgatacagcaaccacaagcaataccaagaaattaggtgacaccgtttcgattacgggtgatacgaacattagtacagttgcgacaactgatggtgtacaggttaagctaaatccaaacttggatttaggagcaactggtagcgttaaaacgggtaataccacgattaacaatgcaggtgtaacagctgatcaagttacagttggtggtgttgttattaacaacacatcaggtattaatgctggtggtaaagcgattaccaatgtagcagcaccaacaaataacacagatgctgctaacaagaagtatgtagatgatgcaggtacagcattaaccaatttgggctttggattaaaagcgcaagatggtacgactgtgaacaagaaattaggcgaagcagttgaagttgttggtgcggacagtaacatcaccacgaaagttgcaggcggtcaggttgcaattgagttaaataaaaacctcaacaacttaactggcattaccgtgaacgatggaaccaatggcaccaatggttcaactgtgattggtaaagatggtatttcggttaaagatggttcaggcaataccattgcaggtgtagataacacagcgttgacagttaaagatggcagtggcaacacagaaaccagcattaaccaagcgatcaacacgttaaatgcagcgcaaggtgaaactgataagtttgcagtgaagtacgacaaaaatgctgatggcagtgtgaactacaacaacatcacattggcaggtacgactgcaagcagtacacaagatgcaactacaggcaagatcaccacaacaggtggaacaagcttgaacaatgttgcaagtgcgggtgactacaaagatgttgccaatgcaagcaaaggtgtaaacgcaggtgacttaaacaatgcagttgttgatgcaaccaatgcagcaaccagcaaaggctttgcattacaagcagcagatggcgctaaagttcagaagaacctaggcgaagcagttgaagttgtcggtgccgacagcaacatcaccacaaaagttgcaggcggtcaggttgcaattgagttaaataaaaacctcaacaacttaactggcattaccgtgaacgatggaaccaatggcaccaatggttcaactgtgattggtaaagatggtatttcagttaaagacggttcaggcaataccattgcaggtgtagataacacagcgttgacagttaaagatggcagtggcaacacagaaaccagcattaaccaagcgatcaacacgttaaatgcagcgcaaggtgaaactgataagtttgcagtgaagtacgacaaaaatacggatggtagtaccaactacaacagtattactgcaggcaatggtaacggtactgcagcaacgatcggaactgacacagcaggtaatagtgttgtgaccagtggcggaactaaaattagtaatgttgcgaatggtgtcaatgcaagtgatgcagtaaacaaaggtcaattggatagcttaagtacaggtcttaccaatacaggctttggtttaaaagcagcagatggcaacaccgttaacaaaaaattaggcgaagcagtagacgttgtcggtgctgacagcaacatcaccacgaaagttgcaggcggtcaggttgcgattgagttaaataaaaacctcaacaacttaactggcattaccgtgaacgatggaaccaatggcaccaatggttcaactgtgattggtaaagatggtatttcgattaaagatggttcaggcaataccattgcaggtgtagataacacagcgttgacagttaaagatggcagtggcaacacagaaaccagcattaaccaagcgatcaacacgttaaatgcagcgcaaggtgaaactgacaagtttgcagtgaagtacgacaagaatgctgatggcagtgcaaactacaacaacatcacattggcaggtacgactgcaagtagcacgcaagatgcaacaacaggcaagatcaccacaacaggtggaacaagcttgaacaacgttgcaagtgcaggtgactacaaagatgttgccaatgcaagcaaaggtgtaaacgcaggtgacttgaacaatgcagttgttgatgcaaccaatgcagcaaccagcaaaggctttgcattacaagcagcagatggcgctaaagttcagaagaacctaggcgaagcagttgaagttgtcggtgcggacagcaacatcaccacaaaagtagtgggtggacaagttgcgattgagttaaataaaaacctcaacaacttaactggcattaccgtgaacgatggaaccaatggcacaaatggttcaactgtgattggtaaagatggtatttcggttaaagatggttcaggtaataccattgcaggtgtagataacacagcgttgacagttaaagatggcagtggcaacacagaaaccagcattaaccaagcgatcaacacgttaaatgcagcgcaaggtgaaactgataagtttgcagtgaagtacgacaaaaatgctgatggcagtgtgaactacaacaacatcacattggcaggtacgactgcaagcagtacacaagatgcaactacaggcaagatcaccacaacaggtggaacaagcttgaacaatgttgcaagtgcgggtgactacaaagatgttgccaatgcaagcaaaggtgtaaacgcaggtgacttaaacaatgcagttgttgatgcaaccaatgcagcaaccagcaaaggctttgcattacaagcagcagatggcgctaaagttcagaagaacctaggcgaagcagttgaagttgtcggtgccgacagcaacatcaccacaaaagttgcaggcggtcaggttgcaattgagttaaataaaaacctcaacaacttaactggcattaccgtgaacgatggaaccaatggcaccaatggttcaactgtgattggtaaagatggtatttcagttaaagacggttcaggcaataccattgcaggtgtagataacacagcgttgacagttaaagatggcagtggcaacacagaaaccagcattaaccaagcgatcaacacgttaaatgcagcgcaaggtgaaactgataagtttgcagtgaagtacgacaaaaatgctgatggcagtgtgaactacaacaacatcacattggcaggtacgactgcaagcagtacacaagatgcaactacaggcaagatcaccacaacaggtggtacaagcttgaacaatgttgcaagtgcgggtgactacaaagatgttgccaatgcaagcaaaggtgtaaacgcaggtgacttgaacaatgcagttgttgatgcaaccaatgcagcgaccagcaaaggctttgcattacaagcagcagatggcgctaaagttcagaagaacctaggcgaagcagttgaagttgttggtgcggacagtaacatcaccacgaaagttgcaggcggtcaggttgcaattgagttaaataaaaacctcaacaacttaactggcattaccgtgaacgatggaaccaatggcaccaatggttcaactgtgattggtaaagatggtatttcggttaaagatggttcaggcaataccattgcaggtgtagataacacagcgttgacagttaaagatggcagtggcaacacagaaaccagcattaaccaagcgatcaacacgttaaatgcagcgcaaggtgaaactgataagtttgcagtgaagtacgacaaaaatgctgatggcagtgcaaactataacaatgtcactttagctggtacaaatggcacaataatcagcaatgttaaagcgggtgctgtgacctcaacatctactgatgcgatcaatggtagccaattatatggtgttgcaaacagcgtgaagaatgcaattggtggttcaaccacaattgatgcaacgactggtgcaatcacgacgaccaatattggtggtacaggttcaaatacgattgatggtgcaatcagcagtattaaagattcagcgactaaagcgaaaaccacggtaagtgctggggataatgttgtcgttacatcgggtaccaatgcagatggctcaacaaactatgaagttgcgacagcgaaagacgttaactttgacaaagtgactgtaggtagtgttgttgtagataaatcaagcaatacaatcaaaggattaagtaataccacttggaacggaacagcagtatcaggtcaagcggcgacagaagaccagttaaaaacggtcagcgatgcgcaaggtgaaactgataagtttgcagtgaagtacgacaaaaatgctgatggcagtgcgaactacaacagtattactgcaggcaatggtaacggtactgcagcaacgatcggaactgacacagcaggtaatagtgttgtgaccagtggcggaactaaaattagtaatgttgcgaatggtgtcaatgcaagtgatgcagtaaacaaaggtcaattggatagcttaagtacaggtcttaccaatacaggctttggtttaaaagcagcagatggcaacaccgttaacaaaaaattaggcgaagcagtagacgttgtcggtgctgacagcaacatcaccacgaaagttgcaggcggtcaggttgcgattgagttaaataaaaacctcaacaacttaactggcattaccgtgaacgatggaaccaatggcaccaatggttcaactgtgattggtaaagatggtatttcgattaaagatggttcaggcaataccattgcaggtgtagataacacagcgttgacggttaaagatagcagtggcaacacagaaaccagcattaaccaagcgatcaacacgttaaatgcagcgcaaggtgaaactgataagtttgcagtgaagtacgataagaatgctgatggcagtgtgaactataacaatgtcactttagcaggtacaaatggcacaataatcagaaatgttaaagcgggtgctgtgacctcaacatctactgatgcgatcaatggtagccaattatacgatattgcaaacagcgtgaagaatgcaattggtggttcaaccacaagagatgtaacgactggtgcaatcacaacgaccaatattggtggtacaggttcaaacacgattgatggtgcaatcagcagtattaaagattcagcgactaaagcgaaaaccacgataagtgctggggataatgttgtcgttacatcgggtaccaatgcagatggctcaacaaactatgaagttgcgacagcgaaagacgttaactttgacaaagtaactgtaggtaatgttgttgttgataaggcaaatgacacgatccaaggtttgagcaataaagatctaaattcaactgattttgcgaccaaaggtagagctgcgactgaagaacagttaaaagcagtgattaccagtaatatcacggaagttgtggatggtaatggcaacaaggtgaatattattgaccaagttgtaaataccaaacctgacaataagaaccaagattcattgttcttaacgtatgacaaacaaggtcaagaaaccacagatcgcctaacgattggtcaaacggtacagaagatgaatactgatggtattaaattcttccataccaatgccgatacatcaaaaggtgatttgggtacaacaaatgactcaagtgcaggtggtttaaactctacagcaattggtgtaaatgcgattgttgcgaatggtgcagatagttcagttgctttaggtcataacaccaaagtcaatggtaaacaatcaattgcaattggttctggtgcagaagctttaggcaatcaatcgatcagtattggtacaggcaataaagtcactggtgatcattcgggtgcgattggtgatccaactattgtaaatggtgcaaacagctactctgtgggtaataacaaccaagtacttacagatgacactttcgtacttggaaacaatgtcaccaaaactattgctggttcagtagtattgggtaacggttcagctgcaacgacaggtgctggtgaggcaggctatgccttatctgtagcaacaaatgcagataaagccgcgatcactaaaactacgtcaagcactggtgctgttgcagttggtgatgcgtcgagcggtatttatcgtcaaattaccggtgttgctgcgggtagcgtagattcagatgctgtgaacgttgcacagttaaaagcggtgggtaaccaagttgtaacgactcaaactacattggtgaacagtttgggtggtaacgctaaagtaaatgcagacggtacgattacaggaccaacttataatgttgctcaaggtaatcagaccaatgttggtgatgcattaactgcgcttgataacgcaattaatactgcggcaacaacatctaaatcgactgtttctaatggtcagaatattgttgtcagcaagagcaaaaatgcagatggttcagacaactatgaagtatcaacagcaaaagacttgacagttgattctgtcaaagcgggtgatacggttctgaataatgcaggtattacaattggcaataacgcagttgtattgaacaacactggattaaccattagtggtggaccaagtgttaccttggcaggcatcgatgcaggcaataaaaccattcaaaatgttgcgaatgcagtaaatgcaacagatgcagtcaacaaagggcaattggacagcgcaattaacaatgtgaataacaatgtaaatgagcttgccaacaacgctgttaaatatgacgatgcatcaaaagataagatcacacttggtggtggggcaactggtacaacaatcaccaatgtgaaagatggtactgttgcgcaaggttctaaagatgctgtgaatggcggtcaattgtggaatgttcaacaacaagttgatcagaacacaactgatattagcaatatcaaaaatgatattaacaacggtactgttggtttggttcaacaagcaggtaaagatgcaccagtgacggttgcaaaagatactggcggtacaacggtgaatgtcgctggaacagatggcaaccgagtagtgacaggtgttaaggaaggtgcagtgaatgcaacatctaaagatgctgtcaatggtagtcaattgaatacaaccaaccaagcggtagtcaattatcttggtggtggggcaggttatgacaacattacaggtagcttcacagcgccaagttatacggtaggtgactcgaaatacaacaatgttggtggcgcaattgatgcattgaatcaagcagatcaagcattgaatagcaaaattgacaatgtcagtaacaagttggataacgcattccgtattaccaacaaccgtattgatgatgtagagaaaaaagccaatgctggtattgccgctgcgatggctctggaatcagcaccatatgtcccaggtaaatatacctatgcagcaggcgcagcttaccacggtggtgaaaatgcggtaggtgtgactttacgtaaaactgcagacaatggtcgttggtcgattacaggcggtgtagctgcagcgtctcaaggcgatgcaagtgttcgtatcggtatcagcggtgtgattgactaa

SEQ ID NO: 23 - protein, 3613 aa, artificial sequence
  Synthetic Construct
MNKIYKVIWNATLLAWVAVSELAKGKTKSTTSKSKAKSLSSSVIVGGIILTTPLSLIAATVQVGGGTNSGTTATASTNCADLYNYQNPENSGSGAAGNYNAGNPSVCSIAIGENAQGGTSGTGGSPGIAIGGNSKATGGLSVAIGGYAQATNVGSIALGTAALSSGFNSLAISRQAAATNNYSIAIGTTSVSKGVGSIAMGHSTNASGDQSIAIGSSTQASGSKSIAIGASAKASTNNSIALGAGSVTSAQSGNSYLTGVGASATNGVVSVGTSTATRRIQNVADGSAASDAVTVAQLDKAYDDTNGRLAAALGTGSGAAYNAANNTYTAPTNIGGTGKNTIDDAIKATQRSVVAGSNIVVTPTTASDGSISYSVATSATPTFTSITVNNAPTAGTDATNKTYVDSKAAASRTEVAAGSNVSGVVKTTGANGQDVYTVNANGTTASAGSSAVTVTPGTKDANNVTDYKVDLSATTKTDIQKGVDAKNAVDTAGLKFKGDTATTSNTKKLGDTVSITGDTNISTVATTDGVQVKLNPNLDLGATGSVKTGNTTINNAGVTADQVTVGGVVINNTSGINAGGKAITNVAAPTNNTDAANKKYVDDAGTALTNLGFGLKAQDGTTVNKKLGEAVDIVGSNSNISTKVNAGKVEVALSNTLDLGTTGSVTTGSTVINNAGVTATQVTANKVTINNAPTAGTDATNKTYVDSKAAASRTEVAAGSNVSGVVKTTGANGQDIYAVNANGTTASAGSSAVTVTPGTKDANNVTDYKVDLSATTKTDIQKGVDAKNAVDTAGLKFKGDTATTSNTKKLGDTVSITGDTNISTVATTDGVQVKLNPNLDLGATGSVKTGNTTINNAGVTADQVTVGGVVINNTSGINAGGKAITNVAAPTNNTDAANKKYVDDAGTALTNLGFGLKAQDGTTVNKKLGEAVDIVGSNSNISTKVNAGKVEVALSNTLDLGTTGSVTTGSTVINNAGVTATQVTANKVTVNNAPTAGTDATNKTYVDSKAAASRTEVAAGSNVSGVVKTTGANGQDVYTVNANGTTASAGSSAVTVTPGTKDANNVTDYKVDLSATTKTDIQKGVDAKNAVDTAGLKFKGDTATTSNTKKLGDTVSITGDTNISTVATTDGVQVKLNPNLDLGATGSVKTGNTTINNAGVTADQVTVGGVVINNTSGINAGGKAITNVAAPTNNTDAANKKYVDDAGTALTNLGFGLKAQDGTTVNKKLGEAVEVVGADSNITTKVAGGQVAIELNKNLNNLTGITVNDGTNGTNGSTVIGKDGISVKDGSGNTIAGVDNTALTVKDGSGNTETSINQAINTLNAAQGETDKFAVKYDKNADGSVNYNNITLAGTTASSTQDATTGKITTTGGTSLNNVASAGDYKDVANASKGVNAGDLNNAVVDATNAATSKGFALQAADGAKVQKNLGEAVEVVGADSNITTKVAGGQVAIELNKNLNNLTGITVNDGTNGTNGSTVIGKDGISVKDGSGNTIAGVDNTALTVKDGSGNTETSINQAINTLNAAQGETDKFAVKYDKNTDGSTNYNSITAGNGNGTAATIGTDTAGNSVVTSGGTKISNVANGVNASDAVNKGQLDSLSTGLTNTGFGLKAADGNTVNKKLGEAVDVVGADSNITTKVAGGQVAIELNKNLNNLTGITVNDGTNGTNGSTVIGKDGISIKDGSGNTIAGVDNTALTVKDGSGNTETSINQAINTLNAAQGETDKFAVKYDKNADGSANYNNITLAGTTASSTQDATTGKITTTGGTSLNNVASAGDYKDVANASKGVNAGDLNNAVVDATNAATSKGFALQAADGAKVQKNLGEAVEVVGADSNITTKVVGGQVAIELNKNLNNLTGITVNDGTNGTNGSTVIGKDGISVKDGSGNTIAGVDNTALTVKDGSGNTETSINQAINTLNAAQGETDKFAVKYDKNADGSVNYNNITLAGTTASSTQDATTGKITTTGGTSLNNVASAGDYKDVANASKGVNAGDLNNAVVDATNAATSKGFALQAADGAKVQKNLGEAVEVVGADSNITTKVAGGQVAIELNKNLNNLTGITVNDGTNGTNGSTVIGKDGISVKDGSGNTIAGVDNTALTVKDGSGNTETSINQAINTLNAAQGETDKFAVKYDKNADGSVNYNNITLAGTTASSTQDATTGKITTTGGTSLNNVASAGDYKDVANASKGVNAGDLNNAVVDATNAATSKGFALQAADGAKVQKNLGEAVEVVGADSNITTKVAGGQVAIELNKNLNNLTGITVNDGTNGTNGSTVIGKDGISVKDGSGNTIAGVDNTALTVKDGSGNTETSINQAINTLNAAQGETDKFAVKYDKNADGSANYNNVTLAGTNGTIISNVKAGAVTSTSTDAINGSQLYGVANSVKNAIGGSTTIDATTGAITTTNIGGTGSNTIDGAISSIKDSATKAKTTVSAGDNVVVTSGTNADGSTNYEVATAKDVNFDKVTVGSVVVDKSSNTIKGLSNTTWNGTAVSGQAATEDQLKTVSDAQGETDKFAVKYDKNADGSANYNSITAGNGNGTAATIGTDTAGNSVVTSGGTKISNVANGVNASDAVNKGQLDSLSTGLTNTGFGLKAADGNTVNKKLGEAVDVVGADSNITTKVAGGQVAIELNKNLNNLTGITVNDGTNGTNGSTVIGKDGISIKDGSGNTIAGVDNTALTVKDSSGNTETSINQAINTLNAAQGETDKFAVKYDKNADGSVNYNNVTLAGTNGTIIRNVKAGAVTSTSTDAINGSQLYDIANSVKNAIGGSTTRDVTTGAITTTNIGGTGSNTIDGAISSIKDSATKAKTTISAGDNVVVTSGTNADGSTNYEVATAKDVNFDKVTVGNVVVDKANDTIQGLSNKDLNSTDFATKGRAATEEQLKAVITSNITEVVDGNGNKVNIIDQVVNTKPDNKNQDSLFLTYDKQGQETTDRLTIGQTVQKMNTDGIKFFHTNADTSKGDLGTTNDSSAGGLNSTAIGVNAIVANGADSSVALGHNTKVNGKQSIAIGSGAEALGNQSISIGTGNKVTGDHSGAIGDPTIVNGANSYSVGNNNQVLTDDTFVLGNNVTKTIAGSVVLGNGSAATTGAGEAGYALSVATNADKAAITKTTSSTGAVAVGDASSGIYRQITGVAAGSVDSDAVNVAQLKAVGNQVVTTQTTLVNSLGGNAKVNADGTITGPTYNVAQGNQTNVGDALTALDNAINTAATTSKSTVSNGQNIVVSKSKNADGSDNYEVSTAKDLTVDSVKAGDTVLNNAGITIGNNAVVLNNTGLTISGGPSVTLAGIDAGNKTIQNVANAVNATDAVNKGQLDSAINNVNNNVNELANNAVKYDDASKDKITLGGGATGTTITNVKDGTVAQGSKDAVNGGQLWNVQQQVDQNTTDISNIKNDINNGTVGLVQQAGKDAPVTVAKDTGGTTVNVAGTDGNRVVTGVKEGAVNATSKDAVNGSQLNTTNQAVVNYLGGGAGYDNITGSFTAPSYTVGDSKYNNVGGAIDALNQADQALNSKIDNVSNKLDNAFRITNNRIDDVEKKANAGIAAAMALESAPYVPGKYTYAAGAAYHGGENAVGVTLRKTADNGRWSITGGVAAASQGDASVRIGISGVID

SEQ ID NO: 24 - DNA, 10971 bp, artificial sequence
  AtaA WChead
  CDS (1)..(10971)
atgaataaaatctacaaagtgatttggaatgcgactttgttggcatgggttgcagtatctgaattggcaaaagggaaaaccaaatctacgacatcaaaatccaaagctaaatcattatcttcatctgtaatagttggtgggataatattaacaacacctttatctttaatagcagctcagttaaaagcagtgattaccagtaatatcacggaagttgtggatggtaatggcaacaaggtgaatattattgaccaagttgtaaataccaaacctgacaataagaaccaagattcattgttcttaacgtatgacaaacaaggtcaagaaaccacagatcgcctaacgattggtcaaacggtacagaagatgaatactgatggtattaaattcttccataccaatgccgatacatcaaaaggtgatttgggtacaacaaatgactcaagtgcaggtggtttaaactctacagcaattggtgtaaatgcgattgttgcgaatggtgcagatagttcagttgctttaggtcataacaccaaagtcaatggtaaacaatcaattgcaattggttctggtgcagaagctttaggcaatcaatcgatcagtattggtacaggcaataaagtcactggtgatcattcgggtgcgattggtgatccaactattgtaaatggtgcaaacagctactctgtgggtaataacaaccaagtacttacagatgacactttcgtacttggaaacaatgtcaccaaaactattgctggttcagtagtattgggtaacggttcagctgcaacgacaggtgctggtgaggcaggctatgccttatctgtagcaacaaatgcagataaagccgcgatcactaaaactacgtcaagcactggtgctgttgcagttggtgatgcgtcgagcggtatttatcgtcaaattaccggtgttgctgcgggtagcgtagattcagatgctgtgaacgttgcacagttaaaagcggtgggtaaccaagttgtaacgactcaaactcagttggataaagcttatgatgatacaaatggtcgtttagctgctgctttaggtacaggtagtggtgctgcctataatgcagcaaacaatacatataccgctccaacgaatattgggggaacaggtaaaaatacgattgatgatgcaattaaagcaactcaacgaagtgtagtcgctggatcaaatattgtcgttaccccgacgacagcttctgatggttcaatatcgtattcggttgctacaagcgcaacaccgacgtttacaagtataactgtaaacaatgcaccaacggcaggtacagatgcgaccaacaagacttatgtagactcaaaagcagcagcatcgagaacagaagtagcagctggaagcaatgtatctggtgtagtaaaaacgacaggcgcaaacggtcaagacgtttatacagtaaatgccaatggtacgactgcatcagcaggttcttcagcagttaccgtaacaccaggcacgaaagatgcaaataatgtcactgactataaagtagacttatcagcgactacaaaaaccgatatccaaaaaggtgtagatgcaaaaaatgctgtagataccgcaggtctaaaatttaaaggtgatacagcaaccacaagcaataccaagaaattaggtgacaccgtttcgattacgggtgatacgaacattagtacagttgcgacaacagatggtgtacaggttaagttaaatccaaacttggatttaggagcaactggtagcgttaaaacgggtaataccacgattaacaatgcaggtgtaacagctgatcaagttacggttggtggtgttgttattaacaacacatcaggtattaatgctggtggtaaagcgattactaatgtagcagcaccaacaaataacacagatgctgctaacaagaagtatgtagatgatgcaggtacagcattaaccaatttgggctttggattaaaagcacaagatggtacgactgtgaacaagaaattaggtgaagcagttgatattgttggttcaaacagcaacatcagtacaaaagtaaatgcaggcaaagtagaagttgcactatccaatacattggacttaggtactacaggtagcgttactacgggttcaactgtaattaacaatgctggtgttacggcaactcaagttaccgcaaacaaagtcacaataaacaatgcaccaacagcaggtacagatgcgaccaacaagacttatgtagactcaaaagcagcagcatcaagaacagaagtcgcagctggaagcaatgtatctggtgtagtaaaaacgacaggcgcaaacggtcaagatatttatgcagtaaatgccaatggtacgactgcatcagcaggttcttcagcagttaccgtaacaccaggcacgaaagatgcaaataatgtcactgactataaagtagacttgtcagcgactacaaaaaccgatattcaaaaaggtgtagatgcaaaaaatgctgtagatactgcaggtctaaaatttaaaggtgatacagcaaccacaagcaataccaagaaattaggtgacaccgtttcgattacgggtgatacgaacattagtacagttgcaacaactgatggtgtacaggttaagttaaatccaaacttagatttaggagcaactggtagcgttaaaacgggtaataccacgattaacaatgcaggtgtaacagctgaccaagttacggttggtggtgttgttattaacaacacatcaggtattaatgctggtggtaaagcgattaccaatgtagcagcaccaacaaataacacagatgctgctaacaagaagtatgtagatgacgcaggtacagcattaaccaatttgggctttggattaaaagcgcaagatggtacgactgtgaacaagaaattaggtgaagcagttgatattgttggttcaaacagcaacatcagtacaaaagtaaatgcaggcaaagtagaagttgcactatccaatacattggacttaggtactacaggtagcgttactacgggttcaactgtaattaacaatgctggtgttacggcaactcaagttaccgcaaacaaagtcacagttaataatgcaccaacagcaggtacagatgcgaccaataaaacttatgtagactcaaaagcagcggcatcaagaacagaagtcgcagctggaagcaatgtatctggcgtagtaaaaacgacaggtgcaaacggtcaagacgtttatacagtaaatgccaatggtacgactgcatcagcaggttcttcagcagttaccgtaacaccaggcacgaaagatgcaaataatgtcactgactataaagtagacttgtcagcgactacaaaaaccgatattcaaaaaggtgtagatgcaaaaaatgctgtagataccgcaggtctaaaatttaaaggtgatacagcaaccacaagcaataccaagaaattaggtgacaccgtttcgattacgggtgatacgaacattagtacagttgcgacaactgatggtgtacaggttaagctaaatccaaacttggatttaggagcaactggtagcgttaaaacgggtaataccacgattaacaatgcaggtgtaacagctgatcaagttacagttggtggtgttgttattaacaacacatcaggtattaatgctggtggtaaagcgattaccaatgtagcagcaccaacaaataacacagatgctgctaacaagaagtatgtagatgatgcaggtacagcattaaccaatttgggctttggattaaaagcgcaagatggtacgactgtgaacaagaaattaggcgaagcagttgaagttgttggtgcggacagtaacatcaccacgaaagttgcaggcggtcaggttgcaattgagttaaataaaaacctcaacaacttaactggcattaccgtgaacgatggaaccaatggcaccaatggttcaactgtgattggtaaagatggtatttcggttaaagatggttcaggcaataccattgcaggtgtagataacacagcgttgacagttaaagatggcagtggcaacacagaaaccagcattaaccaagcgatcaacacgttaaatgcagcgcaaggtgaaactgataagtttgcagtgaagtacgacaaaaatgctgatggcagtgtgaactacaacaacatcacattggcaggtacgactgcaagcagtacacaagatgcaactacaggcaagatcaccacaacaggtggaacaagcttgaacaatgttgcaagtgcgggtgactacaaagatgttgccaatgcaagcaaaggtgtaaacgcaggtgacttaaacaatgcagttgttgatgcaaccaatgcagcaaccagcaaaggctttgcattacaagcagcagatggcgctaaagttcagaagaacctaggcgaagcagttgaagttgtcggtgccgacagcaacatcaccacaaaagttgcaggcggtcaggttgcaattgagttaaataaaaacctcaacaacttaactggcattaccgtgaacgatggaaccaatggcaccaatggttcaactgtgattggtaaagatggtatttcagttaaagacggttcaggcaataccattgcaggtgtagataacacagcgttgacagttaaagatggcagtggcaacacagaaaccagcattaaccaagcgatcaacacgttaaatgcagcgcaaggtgaaactgataagtttgcagtgaagtacgacaaaaatacggatggtagtaccaactacaacagtattactgcaggcaatggtaacggtactgcagcaacgatcggaactgacacagcaggtaatagtgttgtgaccagtggcggaactaaaattagtaatgttgcgaatggtgtcaatgcaagtgatgcagtaaacaaaggtcaattggatagcttaagtacaggtcttaccaatacaggctttggtttaaaagcagcagatggcaacaccgttaacaaaaaattaggcgaagcagtagacgttgtcggtgctgacagcaacatcaccacgaaagttgcaggcggtcaggttgcgattgagttaaataaaaacctcaacaacttaactggcattaccgtgaacgatggaaccaatggcaccaatggttcaactgtgattggtaaagatggtatttcgattaaagatggttcaggcaataccattgcaggtgtagataacacagcgttgacagttaaagatggcagtggcaacacagaaaccagcattaaccaagcgatcaacacgttaaatgcagcgcaaggtgaaactgacaagtttgcagtgaagtacgacaagaatgctgatggcagtgcaaactacaacaacatcacattggcaggtacgactgcaagtagcacgcaagatgcaacaacaggcaagatcaccacaacaggtggaacaagcttgaacaacgttgcaagtgcaggtgactacaaagatgttgccaatgcaagcaaaggtgtaaacgcaggtgacttgaacaatgcagttgttgatgcaaccaatgcagcaaccagcaaaggctttgcattacaagcagcagatggcgctaaagttcagaagaacctaggcgaagcagttgaagttgtcggtgcggacagcaacatcaccacaaaagtagtgggtggacaagttgcgattgagttaaataaaaacctcaacaacttaactggcattaccgtgaacgatggaaccaatggcacaaatggttcaactgtgattggtaaagatggtatttcggttaaagatggttcaggtaataccattgcaggtgtagataacacagcgttgacagttaaagatggcagtggcaacacagaaaccagcattaaccaagcgatcaacacgttaaatgcagcgcaaggtgaaactgataagtttgcagtgaagtacgacaaaaatgctgatggcagtgtgaactacaacaacatcacattggcaggtacgactgcaagcagtacacaagatgcaactacaggcaagatcaccacaacaggtggaacaagcttgaacaatgttgcaagtgcgggtgactacaaagatgttgccaatgcaagcaaaggtgtaaacgcaggtgacttaaacaatgcagttgttgatgcaaccaatgcagcaaccagcaaaggctttgcattacaagcagcagatggcgctaaagttcagaagaacctaggcgaagcagttgaagttgtcggtgccgacagcaacatcaccacaaaagttgcaggcggtcaggttgcaattgagttaaataaaaacctcaacaacttaactggcattaccgtgaacgatggaaccaatggcaccaatggttcaactgtgattggtaaagatggtatttcagttaaagacggttcaggcaataccattgcaggtgtagataacacagcgttgacagttaaagatggcagtggcaacacagaaaccagcattaaccaagcgatcaacacgttaaatgcagcgcaaggtgaaactgataagtttgcagtgaagtacgacaaaaatgctgatggcagtgtgaactacaacaacatcacattggcaggtacgactgcaagcagtacacaagatgcaactacaggcaagatcaccacaacaggtggtacaagcttgaacaatgttgcaagtgcgggtgactacaaagatgttgccaatgcaagcaaaggtgtaaacgcaggtgacttgaacaatgcagttgttgatgcaaccaatgcagcgaccagcaaaggctttgcattacaagcagcagatggcgctaaagttcagaagaacctaggcgaagcagttgaagttgttggtgcggacagtaacatcaccacgaaagttgcaggcggtcaggttgcaattgagttaaataaaaacctcaacaacttaactggcattaccgtgaacgatggaaccaatggcaccaatggttcaactgtgattggtaaagatggtatttcggttaaagatggttcaggcaataccattgcaggtgtagataacacagcgttgacagttaaagatggcagtggcaacacagaaaccagcattaaccaagcgatcaacacgttaaatgcagcgcaaggtgaaactgataagtttgcagtgaagtacgacaaaaatgctgatggcagtgcaaactataacaatgtcactttagctggtacaaatggcacaataatcagcaatgttaaagcgggtgctgtgacctcaacatctactgatgcgatcaatggtagccaattatatggtgttgcaaacagcgtgaagaatgcaattggtggttcaaccacaattgatgcaacgactggtgcaatcacgacgaccaatattggtggtacaggttcaaatacgattgatggtgcaatcagcagtattaaagattcagcgactaaagcgaaaaccacggtaagtgctggggataatgttgtcgttacatcgggtaccaatgcagatggctcaacaaactatgaagttgcgacagcgaaagacgttaactttgacaaagtgactgtaggtagtgttgttgtagataaatcaagcaatacaatcaaaggattaagtaataccacttggaacggaacagcagtatcaggtcaagcggcgacagaagaccagttaaaaacggtcagcgatgcgcaaggtgaaactgataagtttgcagtgaagtacgacaaaaatgctgatggcagtgcgaactacaacagtattactgcaggcaatggtaacggtactgcagcaacgatcggaactgacacagcaggtaatagtgttgtgaccagtggcggaactaaaattagtaatgttgcgaatggtgtcaatgcaagtgatgcagtaaacaaaggtcaattggatagcttaagtacaggtcttaccaatacaggctttggtttaaaagcagcagatggcaacaccgttaacaaaaaattaggcgaagcagtagacgttgtcggtgctgacagcaacatcaccacgaaagttgcaggcggtcaggttgcgattgagttaaataaaaacctcaacaacttaactggcattaccgtgaacgatggaaccaatggcaccaatggttcaactgtgattggtaaagatggtatttcgattaaagatggttcaggcaataccattgcaggtgtagataacacagcgttgacggttaaagatagcagtggcaacacagaaaccagcattaaccaagcgatcaacacgttaaatgcagcgcaaggtgaaactgataagtttgcagtgaagtacgataagaatgctgatggcagtgtgaactataacaatgtcactttagcaggtacaaatggcacaataatcagaaatgttaaagcgggtgctgtgacctcaacatctactgatgcgatcaatggtagccaattatacgatattgcaaacagcgtgaagaatgcaattggtggttcaaccacaagagatgtaacgactggtgcaatcacaacgaccaatattggtggtacaggttcaaacacgattgatggtgcaatcagcagtattaaagattcagcgactaaagcgaaaaccacgataagtgctggggataatgttgtcgttacatcgggtaccaatgcagatggctcaacaaactatgaagttgcgacagcgaaagacgttaactttgacaaagtaactgtaggtaatgttgttgttgataaggcaaatgacacgatccaaggtttgagcaataaagatctaaattcaactgattttgcgaccaaaggtagagctgcgactgaagaacagttaaaagcagtgattaccagtaatatcacggaagttgtggatggtaatggcaacaaggtgaatattattgaccaagttgtaaataccaaacctgacaataagaaccaagattcattgttcttaacgtatgacaaacaaggtcaagaaaccacagatcgcctaacgattggtcaaacggtacagaagatgaatactgatggtattaaattcttccataccaatgccgatacatcaaaaggtgatttgggtacaacaaatgactcaagtgcaggtggtttaaactctacagcaattggtgtaaatgcgattgttgcgaatggtgcagatagttcagttgctttaggtcataacaccaaagtcaatggtaaacaatcaattgcaattggttctggtgcagaagctttaggcaatcaatcgatcagtattggtacaggcaataaagtcactggtgatcattcgggtgcgattggtgatccaactattgtaaatggtgcaaacagctactctgtgggtaataacaaccaagtacttacagatgacactttcgtacttggaaacaatgtcaccaaaactattgctggttcagtagtattgggtaacggttcagctgcaacgacaggtgctggtgaggcaggctatgccttatctgtagcaacaaatgcagataaagccgcgatcactaaaactacgtcaagcactggtgctgttgcagttggtgatgcgtcgagcggtatttatcgtcaaattaccggtgttgctgcgggtagcgtagattcagatgctgtgaacgttgcacagttaaaagcggtgggtaaccaagttgtaacgactcaaactacattggtgaacagtttgggtggtaacgctaaagtaaatgcagacggtacgattacaggaccaacttataatgttgctcaaggtaatcagaccaatgttggtgatgcattaactgcgcttgataacgcaattaatactgcggcaacaacatctaaatcgactgtttctaatggtcagaatattgttgtcagcaagagcaaaaatgcagatggttcagacaactatgaagtatcaacagcaaaagacttgacagttgattctgtcaaagcgggtgatacggttctgaataatgcaggtattacaattggcaataacgcagttgtattgaacaacactggattaaccattagtggtggaccaagtgttaccttggcaggcatcgatgcaggcaataaaaccattcaaaatgttgcgaatgcagtaaatgcaacagatgcagtcaacaaagggcaattggacagcgcaattaacaatgtgaataacaatgtaaatgagcttgccaacaacgctgttaaatatgacgatgcatcaaaagataagatcacacttggtggtggggcaactggtacaacaatcaccaatgtgaaagatggtactgttgcgcaaggttctaaagatgctgtgaatggcggtcaattgtggaatgttcaacaacaagttgatcagaacacaactgatattagcaatatcaaaaatgatattaacaacggtactgttggtttggttcaacaagcaggtaaagatgcaccagtgacggttgcaaaagatactggcggtacaacggtgaatgtcgctggaacagatggcaaccgagtagtgacaggtgttaaggaaggtgcagtgaatgcaacatctaaagatgctgtcaatggtagtcaattgaatacaaccaaccaagcggtagtcaattatcttggtggtggggcaggttatgacaacattacaggtagcttcacagcgccaagttatacggtaggtgactcgaaatacaacaatgttggtggcgcaattgatgcattgaatcaagcagatcaagcattgaatagcaaaattgacaatgtcagtaacaagttggataacgcattccgtattaccaacaaccgtattgatgatgtagagaaaaaagccaatgctggtattgccgctgcgatggctctggaatcagcaccatatgtcccaggtaaatatacctatgcagcaggcgcagcttaccacggtggtgaaaatgcggtaggtgtgactttacgtaaaactgcagacaatggtcgttggtcgattacaggcggtgtagctgcagcgtctcaaggcgatgcaagtgttcgtatcggtatcagcggtgtgattgactaa

SEQ ID NO: 25 - protein, 3656 aa, artificial sequence
  Synthetic Construct
MNKIYKVIWNATLLAWVAVSELAKGKTKSTTSKSKAKSLSSSVIVGGIILTTPLSLIAAQLKAVITSNITEVVDGNGNKVNIIDQVVNTKPDNKNQDSLFLTYDKQGQETTDRLTIGQTVQKMNTDGIKFFHTNADTSKGDLGTTNDSSAGGLNSTAIGVNAIVANGADSSVALGHNTKVNGKQSIAIGSGAEALGNQSISIGTGNKVTGDHSGAIGDPTIVNGANSYSVGNNNQVLTDDTFVLGNNVTKTIAGSVVLGNGSAATTGAGEAGYALSVATNADKAAITKTTSSTGAVAVGDASSGIYRQITGVAAGSVDSDAVNVAQLKAVGNQVVTTQTQLDKAYDDTNGRLAAALGTGSGAAYNAANNTYTAPTNIGGTGKNTIDDAIKATQRSVVAGSNIVVTPTTASDGSISYSVATSATPTFTSITVNNAPTAGTDATNKTYVDSKAAASRTEVAAGSNVSGVVKTTGANGQDVYTVNANGTTASAGSSAVTVTPGTKDANNVTDYKVDLSATTKTDIQKGVDAKNAVDTAGLKFKGDTATTSNTKKLGDTVSITGDTNISTVATTDGVQVKLNPNLDLGATGSVKTGNTTINNAGVTADQVTVGGVVINNTSGINAGGKAITNVAAPTNNTDAANKKYVDDAGTALTNLGFGLKAQDGTTVNKKLGEAVDIVGSNSNISTKVNAGKVEVALSNTLDLGTTGSVTTGSTVINNAGVTATQVTANKVTINNAPTAGTDATNKTYVDSKAAASRTEVAAGSNVSGVVKTTGANGQDIYAVNANGTTASAGSSAVTVTPGTKDANNVTDYKVDLSATTKTDIQKGVDAKNAVDTAGLKFKGDTATTSNTKKLGDTVSITGDTNISTVATTDGVQVKLNPNLDLGATGSVKTGNTTINNAGVTADQVTVGGVVINNTSGINAGGKAITNVAAPTNNTDAANKKYVDDAGTALTNLGFGLKAQDGTTVNKKLGEAVDIVGSNSNISTKVNAGKVEVALSNTLDLGTTGSVTTGSTVINNAGVTATQVTANKVTVNNAPTAGTDATNKTYVDSKAAASRTEVAAGSNVSGVVKTTGANGQDVYTVNANGTTASAGSSAVTVTPGTKDANNVTDYKVDLSATTKTDIQKGVDAKNAVDTAGLKFKGDTATTSNTKKLGDTVSITGDTNISTVATTDGVQVKLNPNLDLGATGSVKTGNTTINNAGVTADQVTVGGVVINNTSGINAGGKAITNVAAPTNNTDAANKKYVDDAGTALTNLGFGLKAQDGTTVNKKLGEAVEVVGADSNITTKVAGGQVAIELNKNLNNLTGITVNDGTNGTNGSTVIGKDGISVKDGSGNTIAGVDNTALTVKDGSGNTETSINQAINTLNAAQGETDKFAVKYDKNADGSVNYNNITLAGTTASSTQDATTGKITTTGGTSLNNVASAGDYKDVANASKGVNAGDLNNAVVDATNAATSKGFALQAADGAKVQKNLGEAVEVVGADSNITTKVAGGQVAIELNKNLNNLTGITVNDGTNGTNGSTVIGKDGISVKDGSGNTIAGVDNTALTVKDGSGNTETSINQAINTLNAAQGETDKFAVKYDKNTDGSTNYNSITAGNGNGTAATIGTDTAGNSVVTSGGTKISNVANGVNASDAVNKGQLDSLSTGLTNTGFGLKAADGNTVNKKLGEAVDVVGADSNITTKVAGGQVAIELNKNLNNLTGITVNDGTNGTNGSTVIGKDGISIKDGSGNTIAGVDNTALTVKDGSGNTETSINQAINTLNAAQGETDKFAVKYDKNADGSANYNNITLAGTTASSTQDATTGKITTTGGTSLNNVASAGDYKDVANASKGVNAGDLNNAVVDATNAATSKGFALQAADGAKVQKNLGEAVEVVGADSNITTKVVGGQVAIELNKNLNNLTGITVNDGTNGTNGSTVIGKDGISVKDGSGNTIAGVDNTALTVKDGSGNTETSINQAINTLNAAQGETDKFAVKYDKNADGSVNYNNITLAGTTASSTQDATTGKITTTGGTSLNNVASAGDYKDVANASKGVNAGDLNNAVVDATNAATSKGFALQAADGAKVQKNLGEAVEVVGADSNITTKVAGGQVAIELNKNLNNLTGITVNDGTNGTNGSTVIGKDGISVKDGSGNTIAGVDNTALTVKDGSGNTETSINQAINTLNAAQGETDKFAVKYDKNADGSVNYNNITLAGTTASSTQDATTGKITTTGGTSLNNVASAGDYKDVANASKGVNAGDLNNAVVDATNAATSKGFALQAADGAKVQKNLGEAVEVVGADSNITTKVAGGQVAIELNKNLNNLTGITVNDGTNGTNGSTVIGKDGISVKDGSGNTIAGVDNTALTVKDGSGNTETSINQAINTLNAAQGETDKFAVKYDKNADGSANYNNVTLAGTNGTIISNVKAGAVTSTSTDAINGSQLYGVANSVKNAIGGSTTIDATTGAITTTNIGGTGSNTIDGAISSIKDSATKAKTTVSAGDNVVVTSGTNADGSTNYEVATAKDVNFDKVTVGSVVVDKSSNTIKGLSNTTWNGTAVSGQAATEDQLKTVSDAQGETDKFAVKYDKNADGSANYNSITAGNGNGTAATIGTDTAGNSVVTSGGTKISNVANGVNASDAVNKGQLDSLSTGLTNTGFGLKAADGNTVNKKLGEAVDVVGADSNITTKVAGGQVAIELNKNLNNLTGITVNDGTNGTNGSTVIGKDGISIKDGSGNTIAGVDNTALTVKDSSGNTETSINQAINTLNAAQGETDKFAVKYDKNADGSVNYNNVTLAGTNGTIIRNVKAGAVTSTSTDAINGSQLYDIANSVKNAIGGSTTRDVTTGAITTTNIGGTGSNTIDGAISSIKDSATKAKTTISAGDNVVVTSGTNADGSTNYEVATAKDVNFDKVTVGNVVVDKANDTIQGLSNKDLNSTDFATKGRAATEEQLKAVITSNITEVVDGNGNKVNIIDQVVNTKPDNKNQDSLFLTYDKQGQETTDRLTIGQTVQKMNTDGIKFFHTNADTSKGDLGTTNDSSAGGLNSTAIGVNAIVANGADSSVALGHNTKVNGKQSIAIGSGAEALGNQSISIGTGNKVTGDHSGAIGDPTIVNGANSYSVGNNNQVLTDDTFVLGNNVTKTIAGSVVLGNGSAATTGAGEAGYALSVATNADKAAITKTTSSTGAVAVGDASSGIYRQITGVAAGSVDSDAVNVAQLKAVGNQVVTTQTTLVNSLGGNAKVNADGTITGPTYNVAQGNQTNVGDALTALDNAINTAATTSKSTVSNGQNIVVSKSKNADGSDNYEVSTAKDLTVDSVKAGDTVLNNAGITIGNNAVVLNNTGLTISGGPSVTLAGIDAGNKTIQNVANAVNATDAVNKGQLDSAINNVNNNVNELANNAVKYDDASKDKITLGGGATGTTITNVKDGTVAQGSKDAVNGGQLWNVQQQVDQNTTDISNIKNDINNGTVGLVQQAGKDAPVTVAKDTGGTTVNVAGTDGNRVVTGVKEGAVNATSKDAVNGSQLNTTNQAVVNYLGGGAGYDNITGSFTAPSYTVGDSKYNNVGGAIDALNQADQALNSKIDNVSNKLDNAFRITNNRIDDVEKKANAGIAAAMALESAPYVPGKYTYAAGAAYHGGENAVGVTLRKTADNGRWSITGGVAAASQGDASVRIGISGVID

SEQ ID NO: 26 - DNA, 1479 bp, artificial sequence
  Nhead-GCN4pII-SNAP-His
  CDS (1)..(1479)
atggctactgttcaagttggagggggaactaattctggaacaactgctacagcttctacgaattgtgcagacttatataattatcaaaatcctgagaactcaggctctggagcggctgggaattataatgcaggaaatccaagtgtgtgttcgatcgctataggtgaaaacgcacaaggtggtacttctggaactggagggtcgccagggatagcgataggtggaaattctaaagctacgggtggtttatctgttgctataggcggatatgctcaagcgacaaatgttggaagtattgctttaggcacagcagctttatcaagtggttttaacagtttagcaatatccagacaagctgctgcaacgaataactattcaatagctataggtacaacttcagtttcgaaaggagttggatcgattgctatggggcattcaacgaatgcttctggagatcaatcgatagcaattggtagctcggatgctgttaattcagcaacagcaacaacaacatacgatggtacaacaaatactcaagcatcaggtagtaaatcgattgctataggtgcaagcgcaaaggcatcaaccaataacagcattgcactaggtgcaggatcggtaacttctgcacaatctggtaattcttatcttactggtgtaggtgcatcagctacaaatggtgttgtatctgttggaacttcaactgcaacacgtcgtatccaaaatgtagcagatggttcagccgcttcagatgctgtgacagttgctcagttggataaagcttatgatgatacaaatggtcgtatgaaacagattgaagataaaattgaagaaattctgagcaaaatttatcatattgaaaacgaaattgcgcgtattaaaaaactgattaagcttggaggaggtggaggtatggacaaagactgcgaaatgaagcgcaccaccctggatagccctctgggcaagctggaactgtctgggtgcgaacagggcctgcaccgtatcatcttcctgggcaaaggaacatctgccgccgacgccgtggaagtgcctgccccagccgccgtgctgggcggaccagagccactgatgcaggccaccgcctggctcaacgcctactttcaccagcctgaggccatcgaggagttccctgtgccagccctgcaccacccagtgttccagcaggagagctttacccgccaggtgctgtggaaactgctgaaagtggtgaagttcggagaggtcatcagctacagccacctggccgccctggccggcaatcccgccgccaccgccgccgtgaaaaccgccctgagcggaaatcccgtgcccattctgatcccctgccaccgggtggtgcagggcgacctggacgtggggggctacgagggcgggctcgccgtgaaagagtggctgctggcccacgagggccacagactgggcaagcctgggctgggtcatcatcatcatcatcactga

SEQ ID NO: 27 - protein, 492 aa, artificial sequence
  Synthetic Construct
MATVQVGGGTNSGTTATASTNCADLYNYQNPENSGSGAAGNYNAGNPSVCSIAIGENAQGGTSGTGGSPGIAIGGNSKATGGLSVAIGGYAQATNVGSIALGTAALSSGFNSLAISRQAAATNNYSIAIGTTSVSKGVGSIAMGHSTNASGDQSIAIGSSDAVNSATATTTYDGTTNTQASGSKSIAIGASAKASTNNSIALGAGSVTSAQSGNSYLTGVGASATNGVVSVGTSTATRRIQNVADGSAASDAVTVAQLDKAYDDTNGRMKQIEDKIEEILSKIYHIENEIARIKKLIKLGGGGGMDKDCEMKRTTLDSPLGKLELSGCEQGLHRIIFLGKGTSAADAVEVPAPAAVLGGPEPLMQATAWLNAYFHQPEAIEEFPVPALHHPVFQQESFTRQVLWKLLKVVKFGEVISYSHLAALAGNPAATAAVKTALSGNPVPILIPCHRVVQGDLDVGGYEGGLAVKEWLLAHEGHRLGKPGLGHHHHHH

SEQ ID NO: 28 - DNA, 1473 bp, artificial sequence
  SNAP-Nhead-GCN4pII-His
  CDS (1)..(1473)
atggacaaagactgcgaaatgaagcgcaccaccctggatagccctctgggcaagctggaactgtctgggtgcgaacagggcctgcaccgtatcatcttcctgggcaaaggaacatctgccgccgacgccgtggaagtgcctgccccagccgccgtgctgggcggaccagagccactgatgcaggccaccgcctggctcaacgcctactttcaccagcctgaggccatcgaggagttccctgtgccagccctgcaccacccagtgttccagcaggagagctttacccgccaggtgctgtggaaactgctgaaagtggtgaagttcggagaggtcatcagctacagccacctggccgccctggccggcaatcccgccgccaccgccgccgtgaaaaccgccctgagcggaaatcccgtgcccattctgatcccctgccaccgggtggtgcagggcgacctggacgtggggggctacgagggcgggctcgccgtgaaagagtggctgctggcccacgagggccacagactgggcaagcctgggctgggtggaggaggtggaggtactgttcaagttggagggggaactaattctggaacaactgctacagcttctacgaattgtgcagacttatataattatcaaaatcctgagaactcaggctctggagcggctgggaattataatgcaggaaatccaagtgtgtgttcgatcgctataggtgaaaacgcacaaggtggtacttctggaactggagggtcgccagggatagcgataggtggaaattctaaagctacgggtggtttatctgttgctataggcggatatgctcaagcgacaaatgttggaagtattgctttaggcacagcagctttatcaagtggttttaacagtttagcaatatccagacaagctgctgcaacgaataactattcaatagctataggtacaacttcagtttcgaaaggagttggatcgattgctatggggcattcaacgaatgcttctggagatcaatcgatagcaattggtagctcggatgctgttaattcagcaacagcaacaacaacatacgatggtacaacaaatactcaagcatcaggtagtaaatcgattgctataggtgcaagcgcaaaggcatcaaccaataacagcattgcactaggtgcaggatcggtaacttctgcacaatctggtaattcttatcttactggtgtaggtgcatcagctacaaatggtgttgtatctgttggaacttcaactgcaacacgtcgtatccaaaatgtagcagatggttcagccgcttcagatgctgtgacagttgctcagttggataaagcttatgatgatacaaatggtcgtatgaaacagattgaagataaaattgaagaaattctgagcaaaatttatcatattgaaaacgaaattgcgcgtattaaaaaactgattaagcttcatcatcatcatcatcactga

SEQ ID NO: 29 - protein, 490 aa, artificial sequence
  Synthetic Construct
MDKDCEMKRTTLDSPLGKLELSGCEQGLHRIIFLGKGTSAADAVEVPAPAAVLGGPEPLMQATAWLNAYFHQPEAIEEFPVPALHHPVFQQESFTRQVLWKLLKVVKFGEVISYSHLAALAGNPAATAAVKTALSGNPVPILIPCHRVVQGDLDVGGYEGGLAVKEWLLAHEGHRLGKPGLGGGGGGTVQVGGGTNSGTTATASTNCADLYNYQNPENSGSGAAGNYNAGNPSVCSIAIGENAQGGTSGTGGSPGIAIGGNSKATGGLSVAIGGYAQATNVGSIALGTAALSSGFNSLAISRQAAATNNYSIAIGTTSVSKGVGSIAMGHSTNASGDQSIAIGSSDAVNSATATTTYDGTTNTQASGSKSIAIGASAKASTNNSIALGAGSVTSAQSGNSYLTGVGASATNGVVSVGTSTATRRIQNVADGSAASDAVTVAQLDKAYDDTNGRMKQIEDKIEEILSKIYHIENEIARIKKLIKLHHHHHH

SEQ ID NO: 30 - DNA, 1386 bp, artificial sequence
  Nhead del GCN4pII
  CDS (1)..(1386)
atggctactgttcaagttggagggggaactaattctggaacaactgctacagcttctacgaattgtgcagacttatataattatcaaaatcctgagaactcaggctctggagcggctgggaattataatgcaggaaatccaagtgtgtgttcgatcgctataggtgaaaacgcacaaggtggtacttctggaactggagggtcgccagggatagcgataggtggaaattctaaagctacgggtggtttatctgttgctataggcggatatgctcaagcgacaaatgttggaagtattgctttaggcacagcagctttatcaagtggttttaacagtttagcaatatccagacaagctgctgcaacgaataactattcaatagctataggtacaacttcagtttcgaaaggagttggatcgattgctatggggcattcaacgaatgcttctggagatcaatcgatagcaattggtagctcggatgctgttaattcagcaacagcaacaacaacatacgatggtacaacaaatactcaagcatcaggtagtaaatcgattgctataggtgcaagcgcaaaggcatcaaccaataacagcattgcactaggtgcaggatcggtaacttctgcacaatctggtaattcttatcttactggtgtaggtgcatcagctacaaatggtgttgtatctgttggaacttcaactgcaacacgtcgtatccaaaatgtagcagatggttcagccgcttcagatgctgtgacagttgctcagttggataaagcttatgatgatacaaatggtcgtggaggaggtggaggtatggacaaagactgcgaaatgaagcgcaccaccctggatagccctctgggcaagctggaactgtctgggtgcgaacagggcctgcaccgtatcatcttcctgggcaaaggaacatctgccgccgacgccgtggaagtgcctgccccagccgccgtgctgggcggaccagagccactgatgcaggccaccgcctggctcaacgcctactttcaccagcctgaggccatcgaggagttccctgtgccagccctgcaccacccagtgttccagcaggagagctttacccgccaggtgctgtggaaactgctgaaagtggtgaagttcggagaggtcatcagctacagccacctggccgccctggccggcaatcccgccgccaccgccgccgtgaaaaccgccctgagcggaaatcccgtgcccattctgatcccctgccaccgggtggtgcagggcgacctggacgtggggggctacgagggcgggctcgccgtgaaagagtggctgctggcccacgagggccacagactgggcaagcctgggctgggtcatcatcatcatcatcactga

SEQ ID NO: 31 - protein, 461 aa, artificial sequence
  Synthetic Construct
MATVQVGGGTNSGTTATASTNCADLYNYQNPENSGSGAAGNYNAGNPSVCSIAIGENAQGGTSGTGGSPGIAIGGNSKATGGLSVAIGGYAQATNVGSIALGTAALSSGFNSLAISRQAAATNNYSIAIGTTSVSKGVGSIAMGHSTNASGDQSIAIGSSDAVNSATATTTYDGTTNTQASGSKSIAIGASAKASTNNSIALGAGSVTSAQSGNSYLTGVGASATNGVVSVGTSTATRRIQNVADGSAASDAVTVAQLDKAYDDTNGRGGGGGMDKDCEMKRTTLDSPLGKLELSGCEQGLHRIIFLGKGTSAADAVEVPAPAAVLGGPEPLMQATAWLNAYFHQPEAIEEFPVPALHHPVFQQESFTRQVLWKLLKVVKFGEVISYSHLAALAGNPAATAAVKTALSGNPVPILIPCHRVVQGDLDVGGYEGGLAVKEWLLAHEGHRLGKPGLGHHHHHH

SEQ ID NO: 32 - DNA, 1446 bp, artificial sequence
  Nhead-SNAP del CC
  CDS (1)..(1446)
atggctactgttcaagttggagggggaactaattctggaacaactgctacagcttctacgaattgtgcagacttatataattatcaaaatcctgagaactcaggctctggagcggctgggaattataatgcaggaaatccaagtgtgtgttcgatcgctataggtgaaaacgcacaaggtggtacttctggaactggagggtcgccagggatagcgataggtggaaattctaaagctacgggtggtttatctgttgctataggcggatatgctcaagcgacaaatgttggaagtattgctttaggcacagcagctttatcaagtggttttaacagtttagcaatatccagacaagctgctgcaacgaataactattcaatagctataggtacaacttcagtttcgaaaggagttggatcgattgctatggggcattcaacgaatgcttctggagatcaatcgatagcaattggtagctcggatgctgttaattcagcaacagcaacaacaacatacgatggtacaacaaatactcaagcatcaggtagtaaatcgattgctataggtgcaagcgcaaaggcatcaaccaataacagcattgcactaggtgcaggatcggtaacttctgcacaatctggtaattcttatcttactggtgtaggtgcatcagctacaaatggtgttgtatctgttggaacttcaactgcaacacgtcgtatccaaaatgtagcagatggttcagccgcttcagatgctgtgacagttgctcagatgaaacagattgaagataaaattgaagaaattctgagcaaaatttatcatattgaaaacgaaattgcgcgtattaaaaaactgattaagcttggaggaggtggaggtatggacaaagactgcgaaatgaagcgcaccaccctggatagccctctgggcaagctggaactgtctgggtgcgaacagggcctgcaccgtatcatcttcctgggcaaaggaacatctgccgccgacgccgtggaagtgcctgccccagccgccgtgctgggcggaccagagccactgatgcaggccaccgcctggctcaacgcctactttcaccagcctgaggccatcgaggagttccctgtgccagccctgcaccacccagtgttccagcaggagagctttacccgccaggtgctgtggaaactgctgaaagtggtgaagttcggagaggtcatcagctacagccacctggccgccctggccggcaatcccgccgccaccgccgccgtgaaaaccgccctgagcggaaatcccgtgcccattctgatcccctgccaccgggtggtgcagggcgacctggacgtggggggctacgagggcgggctcgccgtgaaagagtggctgctggcccacgagggccacagactgggcaagcctgggctgggtcatcatcatcatcatcactga

SEQ ID NO: 33 - protein, 481 aa, artificial sequence
  Synthetic Construct
MATVQVGGGTNSGTTATASTNCADLYNYQNPENSGSGAAGNYNAGNPSVCSIAIGENAQGGTSGTGGSPGIAIGGNSKATGGLSVAIGGYAQATNVGSIALGTAALSSGFNSLAISRQAAATNNYSIAIGTTSVSKGVGSIAMGHSTNASGDQSIAIGSSDAVNSATATTTYDGTTNTQASGSKSIAIGASAKASTNNSIALGAGSVTSAQSGNSYLTGVGASATNGVVSVGTSTATRRIQNVADGSAASDAVTVAQMKQIEDKIEEILSKIYHIENEIARIKKLIKLGGGGGMDKDCEMKRTTLDSPLGKLELSGCEQGLHRIIFLGKGTSAADAVEVPAPAAVLGGPEPLMQATAWLNAYFHQPEAIEEFPVPALHHPVFQQESFTRQVLWKLLKVVKFGEVISYSHLAALAGNPAATAAVKTALSGNPVPILIPCHRVVQGDLDVGGYEGGLAVKEWLLAHEGHRLGKPGLGHHHHHH

SEQ ID NO: 34 - DNA, 9228 bp, artificial sequence
  NhNs-AtaA
  CDS (1)..(9228)
atggctactgttcaagttggagggggaactaattctggaacaactgctacagcttctacgaattgtgcagacttatataattatcaaaatcctgagaactcaggctctggagcggctgggaattataatgcaggaaatccaagtgtgtgttcgatcgctataggtgaaaacgcacaaggtggtacttctggaactggagggtcgccagggatagcgataggtggaaattctaaagctacgggtggtttatctgttgctataggcggatatgctcaagcgacaaatgttggaagtattgctttaggcacagcagctttatcaagtggttttaacagtttagcaatatccagacaagctgctgcaacgaataactattcaatagctataggtacaacttcagtttcgaaaggagttggatcgattgctatggggcattcaacgaatgcttctggagatcaatcgatagcaattggtagctcggatgctgttaattcagcaacagcaacaacaacatacgatggtacaacaaatactcaagcatcaggtagtaaatcgattgctataggtgcaagcgcaaaggcatcaaccaataacagcattgcactaggtgcaggatcggtaacttctgcacaatctggtaattcttatcttactggtgtaggtgcatcagctacaaatggtgttgtatctgttggaacttcaactgcaacacgtcgtatccaaaatgtagcagatggttcagccgcttcagatgctgtgacagttgctcagttggataaagcttatgatgatacaaatggtcgtttagctgctgctttaggtacaggtagtggtgctgcctataatgcagcaaacaatacatataccgctccaacgaatattgggggaacaggtaaaaatacgattgatgatgcaattaaagcaactcaacgaagtgtagtcgctggatcaaatattgtcgttaccccgacgacagcttctgatggttcaatatcgtattcggttgctacaagcgcaacaccgacgtttacaagtataactgtaaacaatgcaccaacggcaggtacagatgcgaccaacaagacttatgtagactcaaaagcagcagcatcgagaacagaagtagcagctggaagcaatgtatctggtgtagtaaaaacgacaggcgcaaacggtcaagacgtttatacagtaaatgccaatggtacgactgcatcagcaggttcttcagcagttaccgtaacaccaggcacgaaagatgcaaataatgtcactgactataaagtagacttatcagcgactacaaaaaccgatatccaaaaaggtgtagatgcaaaaaatgctgtagataccgcaggtctaaaatttaaaggtgatacagcaaccacaagcaataccaagaaattaggtgacaccgtttcgattacgggtgatacgaacattagtacagttgcgacaacagatggtgtacaggttaagttaaatccaaacttggatttaggagcaactggtagcgttaaaacgggtaataccacgattaacaatgcaggtgtaacagctgatcaagttacggttggtggtgttgttattaacaacacatcaggtattaatgctggtggtaaagcgattactaatgtagcagcaccaacaaataacacagatgctgctaacaagaagtatgtagatgatgcaggtacagcattaaccaatttgggctttggattaaaagcacaagatggtacgactgtgaacaagaaattaggtgaagcagttgatattgttggttcaaacagcaacatcagtacaaaagtaaatgcaggcaaagtagaagttgcactatccaatacattggacttaggtactacaggtagcgttactacgggttcaactgtaattaacaatgctggtgttacggcaactcaagttaccgcaaacaaagtcacaataaacaatgcaccaacagcaggtacagatgcgaccaacaagacttatgtagactcaaaagcagcagcatcaagaacagaagtcgcagctggaagcaatgtatctggtgtagtaaaaacgacaggcgcaaacggtcaagatatttatgcagtaaatgccaatggtacgactgcatcagcaggttcttcagcagttaccgtaacaccaggcacgaaagatgcaaataatgtcactgactataaagtagacttgtcagcgactacaaaaaccgatattcaaaaaggtgtagatgcaaaaaatgctgtagatactgcaggtctaaaatttaaaggtgatacagcaaccacaagcaataccaagaaattaggtgacaccgtttcgattacgggtgatacgaacattagtacagttgcaacaactgatggtgtacaggttaagttaaatccaaacttagatttaggagcaactggtagcgttaaaacgggtaataccacgattaacaatgcaggtgtaacagctgaccaagttacggttggtggtgttgttattaacaacacatcaggtattaatgctggtggtaaagcgattaccaatgtagcagcaccaacaaataacacagatgctgctaacaagaagtatgtagatgacgcaggtacagcattaaccaatttgggctttggattaaaagcgcaagatggtacgactgtgaacaagaaattaggtgaagcagttgatattgttggttcaaacagcaacatcagtacaaaagtaaatgcaggcaaagtagaagttgcactatccaatacattggacttaggtactacaggtagcgttactacgggttcaactgtaattaacaatgctggtgttacggcaactcaagttaccgcaaacaaagtcacagttaataatgcaccaacagcaggtacagatgcgaccaataaaacttatgtagactcaaaagcagcggcatcaagaacagaagtcgcagctggaagcaatgtatctggcgtagtaaaaacgacaggtgcaaacggtcaagacgtttatacagtaaatgccaatggtacgactgcatcagcaggttcttcagcagttaccgtaacaccaggcacgaaagatgcaaataatgtcactgactataaagtagacttgtcagcgactacaaaaaccgatattcaaaaaggtgtagatgcaaaaaatgctgtagataccgcaggtctaaaatttaaaggtgatacagcaaccacaagcaataccaagaaattaggtgacaccgtttcgattacgggtgatacgaacattagtacagttgcgacaactgatggtgtacaggttaagctaaatccaaacttggatttaggagcaactggtagcgttaaaacgggtaataccacgattaacaatgcaggtgtaacagctgatcaagttacagttggtggtgttgttattaacaacacatcaggtattaatgctggtggtaaagcgattaccaatgtagcagcaccaacaaataacacagatgctgctaacaagaagtatgtagatgatgcaggtacagcattaaccaatttgggctttggattaaaagcgcaagatggtacgactgtgaacaagaaattaggcgaagcagttgaagttgttggtgcggacagtaacatcaccacgaaagttgcaggcggtcaggttgcaattgagttaaataaaaacctcaacaacttaactggcattaccgtgaacgatggaaccaatggcaccaatggttcaactgtgattggtaaagatggtatttcggttaaagatggttcaggcaataccattgcaggtgtagataacacagcgttgacagttaaagatggcagtggcaacacagaaaccagcattaaccaagcgatcaacacgttaaatgcagcgcaaggtgaaactgataagtttgcagtgaagtacgacaaaaatgctgatggcagtgtgaactacaacaacatcacattggcaggtacgactgcaagcagtacacaagatgcaactacaggcaagatcaccacaacaggtggaacaagcttgaacaatgttgcaagtgcgggtgactacaaagatgttgccaatgcaagcaaaggtgtaaacgcaggtgacttaaacaatgcagttgttgatgcaaccaatgcagcaaccagcaaaggctttgcattacaagcagcagatggcgctaaagttcagaagaacctaggcgaagcagttgaagttgtcggtgccgacagcaacatcaccacaaaagttgcaggcggtcaggttgcaattgagttaaataaaaacctcaacaacttaactggcattaccgtgaacgatggaaccaatggcaccaatggttcaactgtgattggtaaagatggtatttcagttaaagacggttcaggcaataccattgcaggtgtagataacacagcgttgacagttaaagatggcagtggcaacacagaaaccagcattaaccaagcgatcaacacgttaaatgcagcgcaaggtgaaactgataagtttgcagtgaagtacgacaaaaatacggatggtagtaccaactacaacagtattactgcaggcaatggtaacggtactgcagcaacgatcggaactgacacagcaggtaatagtgttgtgaccagtggcggaactaaaattagtaatgttgcgaatggtgtcaatgcaagtgatgcagtaaacaaaggtcaattggatagcttaagtacaggtcttaccaatacaggctttggtttaaaagcagcagatggcaacaccgttaacaaaaaattaggcgaagcagtagacgttgtcggtgctgacagcaacatcaccacgaaagttgcaggcggtcaggttgcgattgagttaaataaaaacctcaacaacttaactggcattaccgtgaacgatggaaccaatggcaccaatggttcaactgtgattggtaaagatggtatttcgattaaagatggttcaggcaataccattgcaggtgtagataacacagcgttgacagttaaagatggcagtggcaacacagaaaccagcattaaccaagcgatcaacacgttaaatgcagcgcaaggtgaaactgacaagtttgcagtgaagtacgacaagaatgctgatggcagtgcaaactacaacaacatcacattggcaggtacgactgcaagtagcacgcaagatgcaacaacaggcaagatcaccacaacaggtggaacaagcttgaacaacgttgcaagtgcaggtgactacaaagatgttgccaatgcaagcaaaggtgtaaacgcaggtgacttgaacaatgcagttgttgatgcaaccaatgcagcaaccagcaaaggctttgcattacaagcagcagatggcgctaaagttcagaagaacctaggcgaagcagttgaagttgtcggtgcggacagcaacatcaccacaaaagtagtgggtggacaagttgcgattgagttaaataaaaacctcaacaacttaactggcattaccgtgaacgatggaaccaatggcacaaatggttcaactgtgattggtaaagatggtatttcggttaaagatggttcaggtaataccattgcaggtgtagataacacagcgttgacagttaaagatggcagtggcaacacagaaaccagcattaaccaagcgatcaacacgttaaatgcagcgcaaggtgaaactgataagtttgcagtgaagtacgacaaaaatgctgatggcagtgtgaactacaacaacatcacattggcaggtacgactgcaagcagtacacaagatgcaactacaggcaagatcaccacaacaggtggaacaagcttgaacaatgttgcaagtgcgggtgactacaaagatgttgccaatgcaagcaaaggtgtaaacgcaggtgacttaaacaatgcagttgttgatgcaaccaatgcagcaaccagcaaaggctttgcattacaagcagcagatggcgctaaagttcagaagaacctaggcgaagcagttgaagttgtcggtgccgacagcaacatcaccacaaaagttgcaggcggtcaggttgcaattgagttaaataaaaacctcaacaacttaactggcattaccgtgaacgatggaaccaatggcaccaatggttcaactgtgattggtaaagatggtatttcagttaaagacggttcaggcaataccattgcaggtgtagataacacagcgttgacagttaaagatggcagtggcaacacagaaaccagcattaaccaagcgatcaacacgttaaatgcagcgcaaggtgaaactgataagtttgcagtgaagtacgacaaaaatgctgatggcagtgtgaactacaacaacatcacattggcaggtacgactgcaagcagtacacaagatgcaactacaggcaagatcaccacaacaggtggtacaagcttgaacaatgttgcaagtgcgggtgactacaaagatgttgccaatgcaagcaaaggtgtaaacgcaggtgacttgaacaatgcagttgttgatgcaaccaatgcagcgaccagcaaaggctttgcattacaagcagcagatggcgctaaagttcagaagaacctaggcgaagcagttgaagttgttggtgcggacagtaacatcaccacgaaagttgcaggcggtcaggttgcaattgagttaaataaaaacctcaacaacttaactggcattaccgtgaacgatggaaccaatggcaccaatggttcaactgtgattggtaaagatggtatttcggttaaagatggttcaggcaataccattgcaggtgtagataacacagcgttgacagttaaagatggcagtggcaacacagaaaccagcattaaccaagcgatcaacacgttaaatgcagcgcaaggtgaaactgataagtttgcagtgaagtacgacaaaaatgctgatggcagtgcaaactataacaatgtcactttagctggtacaaatggcacaataatcagcaatgttaaagcgggtgctgtgacctcaacatctactgatgcgatcaatggtagccaattatatggtgttgcaaacagcgtgaagaatgcaattggtggttcaaccacaattgatgcaacgactggtgcaatcacgacgaccaatattggtggtacaggttcaaatacgattgatggtgcaatcagcagtattaaagattcagcgactaaagcgaaaaccacggtaagtgctggggataatgttgtcgttacatcgggtaccaatgcagatggctcaacaaactatgaagttgcgacagcgaaagacgttaactttgacaaagtgactgtaggtagtgttgttgtagataaatcaagcaatacaatcaaaggattaagtaataccacttggaacggaacagcagtatcaggtcaagcggcgacagaagaccagttaaaaacggtcagcgatgcgcaaggtgaaactgataagtttgcagtgaagtacgacaaaaatgctgatggcagtgcgaactacaacagtattactgcaggcaatggtaacggtactgcagcaacgatcggaactgacacagcaggtaatagtgttgtgaccagtggcggaactaaaattagtaatgttgcgaatggtgtcaatgcaagtgatgcagtaaacaaaggtcaattggatagcttaagtacaggtcttaccaatacaggctttggtttaaaagcagcagatggcaacaccgttaacaaaaaattaggcgaagcagtagacgttgtcggtgctgacagcaacatcaccacgaaagttgcaggcggtcaggttgcgattgagttaaataaaaacctcaacaacttaactggcattaccgtgaacgatggaaccaatggcaccaatggttcaactgtgattggtaaagatggtatttcgattaaagatggttcaggcaataccattgcaggtgtagataacacagcgttgacggttaaagatagcagtggcaacacagaaaccagcattaaccaagcgatcaacacgttaaatgcagcgcaaggtgaaactgataagtttgcagtgaagtacgataagaatgctgatggcagtgtgaactataacaatgtcactttagcaggtacaaatggcacaataatcagaaatgttaaagcgggtgctgtgacctcaacatctactgatgcgatcaatggtagccaattatacgatattgcaaacagcgtgaagaatgcaattggtggttcaaccacaagagatgtaacgactggtgcaatcacaacgaccaatattggtggtacaggttcaaacacgattgatggtgcaatcagcagtattaaagattcagcgactaaagcgaaaaccacgataagtgctggggataatgttgtcgttacatcgggtaccaatgcagatggctcaacaaactatgaagttgcgacagcgaaagacgttaactttgacaaagtaactgtaggtaatgttgttgttgataaggcaaatgacacgatccaaggtttgagcaataaagatctaaattcaactgattttgcgaccaaaggtagagctgcgactgaagaacagttaaaacagattgaagataaaattgaagaaattctgagcaaaatttatcatattgaaaacgaaattgcgcgtattaaaaaactgattaagcttggaggaggtggaggtatggacaaagactgcgaaatgaagcgcaccaccctggatagccctctgggcaagctggaactgtctgggtgcgaacagggcctgcaccgtatcatcttcctgggcaaaggaacatctgccgccgacgccgtggaagtgcctgccccagccgccgtgctgggcggaccagagccactgatgcaggccaccgcctggctcaacgcctactttcaccagcctgaggccatcgaggagttccctgtgccagccctgcaccacccagtgttccagcaggagagctttacccgccaggtgctgtggaaactgctgaaagtggtgaagttcggagaggtcatcagctacagccacctggccgccctggccggcaatcccgccgccaccgccgccgtgaaaaccgccctgagcggaaatcccgtgcccattctgatcccctgccaccgggtggtgcagggcgacctggacgtggggggctacgagggcgggctcgccgtgaaagagtggctgctggcccacgagggccacagactgggcaagcctgggctgggtggcggcggcagctggagccacccgcagttcgaaaaatga

SEQ ID NO: 35 - protein, 3075 aa, artificial sequence
  Synthetic Construct
MATVQVGGGTNSGTTATASTNCADLYNYQNPENSGSGAAGNYNAGNPSVCSIAIGENAQGGTSGTGGSPGIAIGGNSKATGGLSVAIGGYAQATNVGSIALGTAALSSGFNSLAISRQAAATNNYSIAIGTTSVSKGVGSIAMGHSTNASGDQSIAIGSSDAVNSATATTTYDGTTNTQASGSKSIAIGASAKASTNNSIALGAGSVTSAQSGNSYLTGVGASATNGVVSVGTSTATRRIQNVADGSAASDAVTVAQLDKAYDDTNGRLAAALGTGSGAAYNAANNTYTAPTNIGGTGKNTIDDAIKATQRSVVAGSNIVVTPTTASDGSISYSVATSATPTFTSITVNNAPTAGTDATNKTYVDSKAAASRTEVAAGSNVSGVVKTTGANGQDVYTVNANGTTASAGSSAVTVTPGTKDANNVTDYKVDLSATTKTDIQKGVDAKNAVDTAGLKFKGDTATTSNTKKLGDTVSITGDTNISTVATTDGVQVKLNPNLDLGATGSVKTGNTTINNAGVTADQVTVGGVVINNTSGINAGGKAITNVAAPTNNTDAANKKYVDDAGTALTNLGFGLKAQDGTTVNKKLGEAVDIVGSNSNISTKVNAGKVEVALSNTLDLGTTGSVTTGSTVINNAGVTATQVTANKVTINNAPTAGTDATNKTYVDSKAAASRTEVAAGSNVSGVVKTTGANGQDIYAVNANGTTASAGSSAVTVTPGTKDANNVTDYKVDLSATTKTDIQKGVDAKNAVDTAGLKFKGDTATTSNTKKLGDTVSITGDTNISTVATTDGVQVKLNPNLDLGATGSVKTGNTTINNAGVTADQVTVGGVVINNTSGINAGGKAITNVAAPTNNTDAANKKYVDDAGTALTNLGFGLKAQDGTTVNKKLGEAVDIVGSNSNISTKVNAGKVEVALSNTLDLGTTGSVTTGSTVINNAGVTATQVTANKVTVNNAPTAGTDATNKTYVDSKAAASRTEVAAGSNVSGVVKTTGANGQDVYTVNANGTTASAGSSAVTVTPGTKDANNVTDYKVDLSATTKTDIQKGVDAKNAVDTAGLKFKGDTATTSNTKKLGDTVSITGDTNISTVATTDGVQVKLNPNLDLGATGSVKTGNTTINNAGVTADQVTVGGVVINNTSGINAGGKAITNVAAPTNNTDAANKKYVDDAGTALTNLGFGLKAQDGTTVNKKLGEAVEVVGADSNITTKVAGGQVAIELNKNLNNLTGITVNDGTNGTNGSTVIGKDGISVKDGSGNTIAGVDNTALTVKDGSGNTETSINQAINTLNAAQGETDKFAVKYDKNADGSVNYNNITLAGTTASSTQDATTGKITTTGGTSLNNVASAGDYKDVANASKGVNAGDLNNAVVDATNAATSKGFALQAADGAKVQKNLGEAVEVVGADSNITTKVAGGQVAIELNKNLNNLTGITVNDGTNGTNGSTVIGKDGISVKDGSGNTIAGVDNTALTVKDGSGNTETSINQAINTLNAAQGETDKFAVKYDKNTDGSTNYNSITAGNGNGTAATIGTDTAGNSVVTSGGTKISNVANGVNASDAVNKGQLDSLSTGLTNTGFGLKAADGNTVNKKLGEAVDVVGADSNITTKVAGGQVAIELNKNLNNLTGITVNDGTNGTNGSTVIGKDGISIKDGSGNTIAGVDNTALTVKDGSGNTETSINQAINTLNAAQGETDKFAVKYDKNADGSANYNNITLAGTTASSTQDATTGKITTTGGTSLNNVASAGDYKDVANASKGVNAGDLNNAVVDATNAATSKGFALQAADGAKVQKNLGEAVEVVGADSNITTKVVGGQVAIELNKNLNNLTGITVNDGTNGTNGSTVIGKDGISVKDGSGNTIAGVDNTALTVKDGSGNTETSINQAINTLNAAQGETDKFAVKYDKNADGSVNYNNITLAGTTASSTQDATTGKITTTGGTSLNNVASAGDYKDVANASKGVNAGDLNNAVVDATNAATSKGFALQAADGAKVQKNLGEAVEVVGADSNITTKVAGGQVAIELNKNLNNLTGITVNDGTNGTNGSTVIGKDGISVKDGSGNTIAGVDNTALTVKDGSGNTETSINQAINTLNAAQGETDKFAVKYDKNADGSVNYNNITLAGTTASSTQDATTGKITTTGGTSLNNVASAGDYKDVANASKGVNAGDLNNAVVDATNAATSKGFALQAADGAKVQKNLGEAVEVVGADSNITTKVAGGQVAIELNKNLNNLTGITVNDGTNGTNGSTVIGKDGISVKDGSGNTIAGVDNTALTVKDGSGNTETSINQAINTLNAAQGETDKFAVKYDKNADGSANYNNVTLAGTNGTIISNVKAGAVTSTSTDAINGSQLYGVANSVKNAIGGSTTIDATTGAITTTNIGGTGSNTIDGAISSIKDSATKAKTTVSAGDNVVVTSGTNADGSTNYEVATAKDVNFDKVTVGSVVVDKSSNTIKGLSNTTWNGTAVSGQAATEDQLKTVSDAQGETDKFAVKYDKNADGSANYNSITAGNGNGTAATIGTDTAGNSVVTSGGTKISNVANGVNASDAVNKGQLDSLSTGLTNTGFGLKAADGNTVNKKLGEAVDVVGADSNITTKVAGGQVAIELNKNLNNLTGITVNDGTNGTNGSTVIGKDGISIKDGSGNTIAGVDNTALTVKDSSGNTETSINQAINTLNAAQGETDKFAVKYDKNADGSVNYNNVTLAGTNGTIIRNVKAGAVTSTSTDAINGSQLYDIANSVKNAIGGSTTRDVTTGAITTTNIGGTGSNTIDGAISSIKDSATKAKTTISAGDNVVVTSGTNADGSTNYEVATAKDVNFDKVTVGNVVVDKANDTIQGLSNKDLNSTDFATKGRAATEEQLKQIEDKIEEILSKIYHIENEIARIKKLIKLGGGGGMDKDCEMKRTTLDSPLGKLELSGCEQGLHRIIFLGKGTSAADAVEVPAPAAVLGGPEPLMQATAWLNAYFHQPEAIEEFPVPALHHPVFQQESFTRQVLWKLLKVVKFGEVISYSHLAALAGNPAATAAVKTALSGNPVPILIPCHRVVQGDLDVGGYEGGLAVKEWLLAHEGHRLGKPGLGGGGSWSHPQFEK

SEQ ID NO: 36 - protein, 443 aa, artificial sequence
  SpyCatcher-Ata59-325-GCN4pII-His
MDYDIPTTENLYFQGAMVTTLSGLSGEQGPSGDMTTEEDSATHIKFSKRDEDGRELAGATMELRDSSGKTISTWISDGHVKDFYLYPGKYTFVETAAPDGYEVATAITFTVNEQGQVTVNGEATKGDAHTGSSGSGGGGGTVQVGGGTNSGTTATASTNCADLYNYQNPENSGSGAAGNYNAGNPSVCSIAIGENAQGGTSGTGGSPGIAIGGNSKATGGLSVAIGGYAQATNVGSIALGTAALSSGFNSLAISRQAAATNNYSIAIGTTSVSKGVGSIAMGHSTNASGDQSIAIGSSDAVNSATATTTYDGTTNTQASGSKSIAIGASAKASTNNSIALGAGSVTSAQSGNSYLTGVGASATNGVVSVGTSTATRRIQNVADGSAASDAVTVAQLDKAYDDTNGRMKQIEDKIEEILSKIYHIENEIARIKKLIKLHHHHHH

SEQ ID NO: 37 - protein, 268 aa, artificial sequence
  SpyTag-GFP-His
MVPTIVMVDAYKRYKGLGSGRMSKGEELFTGVVPILVELDGDVNGHKFSVSGEGEGDATYGKLTLKFICTTGKLPVPWPTLVTTLTYGVQCFSRYPDHMKRHDFFKSAMPEGYVQERTIFFKDDGNYKTRAEVKFEGDTLVNRIELKGIDFKEDGNILGHKLEYNYNSHNVYITADKQKNGIKANFKIRHNIEDGSVQLADHYQQNTPIGDGPVLLPDNHYLSTQSALSKDPNEKRDHMVLLEFVTAAGITHGMDELYKGGGHHHHHH

SEQ ID NO: 38 - DNA, 35 bp, artificial sequence
  Primer Sequence
ggatccagtggtagcggaggaggtggaggtgctac

SEQ ID NO: 39 - DNA, 35 bp, artificial sequence
  Primer Sequence
gatgtcgtaatccattttttgccctcgttatctag

SEQ ID NO: 40 - DNA, 18 bp, artificial sequence
  Primer Sequence
gattacgacatcccaacg

SEQ ID NO: 41 - DNA, 21 bp, artificial sequence
  Primer Sequence
gctaccactggatccagtatg

SEQ ID NO: 42 - DNA, 38 bp, artificial sequence
  Primer Sequence
ggtcatcaccaccatcatcattaatgaggatccggctg

SEQ ID NO: 43 - DNA, 45 bp, artificial sequence
  Primer Sequence
aggcgtccaccatcacgatagtaggcaccatggagcccaggccca

SEQ ID NO: 44 - DNA, 46 bp, artificial sequence
  Primer Sequence
tgatggtggacgcctacaagcgttacaagggcttgggaagcggccg

SEQ ID NO: 45 - DNA, 40 bp, artificial sequence
  Primer Sequence
atggtggtgatgaccgcctcctttgtagagctcatccatg
